(19) United States
(12) Patent Application Publication
(10) Pub. No.: US 2015/0351390 A1
(43) Pub. Date: Dec. 10, 2015

(54) COMPOSITIONS AND METHODS FOR AUXIN-ANALOG CONJUGATION

(71) Applicant: PIONEER HI-BRED INTERNATIONAL, INC., Johnston, IA (US)

(72) Inventors: Linda A. Castle, Mountain View, CA (US); Li-Wei Chiu, San Jose, CA (US); Yumin Tao, Fremont, CA (US)

(21) Appl. No.: 14/654,218

(22) PCT Filed: Dec. 20, 2013
(86) PCT No.: PCT/US2013/076771

§ 371 Date: Jun. 19, 2015

Related U.S. Application Data
(60) Provisional application No. 61/740,759, filed on Dec. 21, 2012.
(60) Provisional application No. 61/777,045, filed on Mar. 12, 2013.
(60) Provisional application No. 61/781,996, filed on Mar. 14, 2013.

(51) Int. Cl. A01N 37/38; C12N 9/24; C12N 15/82; A01N 37/10

(52) U.S. Cl. CPC A01N 37/38; A01N 37/10; C12N 9/2402; C12N 15/8274; C12N 15/8294; C12Y 302/01

(57) ABSTRACT

Compositions and methods are provided to detoxify an auxin-analog herbicide through the use of at least one GH3 polypeptide having amino acid/auxin analog herbicide conjugation activity. Such GH3 polypeptides in the presence of an auxin-analog herbicide will produce an amino acid/auxin-analog conjugate having reduced herbicidal activity.

Various methods of employing the GH3 polypeptides and the polynucleotides encoding the same are provided. Such methods include methods to detoxify an auxin-analog herbicide comprising applying to a plant, a plant cell or a seed an auxin-analog herbicide, wherein the plant, plant cell or seed comprises a heterologous polynucleotide encoding a GH3 polypeptide, and expression of the GH3 polypeptide produces a non-herbicidal aspartate/auxin-analog conjugate or a glutamate/auxin-analog conjugate. Additional methods for controlling at least one weed in an area of cultivation comprising a crop or a seed of the crop are provided, as are methods of detoxifying a contaminated material having an auxin-analog herbicide.

### CROSS-REFERENCE TO RELATED APPLICATIONS

[0001] This application claims the benefit of U.S. Provisional Application No. 61/740,759, filed on Dec. 21, 2012; U.S. Provisional Application No. 61/777,045, filed on Mar. 12, 2013; and U.S. Provisional Application No. 61/781,996, filed on Mar. 14, 2013; each of which is incorporated herein by reference in its entirety.

### FIELD OF THE INVENTION

[0002] This invention is in the field of molecular biology. More specifically, this invention pertains to method and compositions to detoxify an auxin-analog herbicide through the use of a GH3 polypeptide or active variant or fragment thereof.

### REFERENCE TO A SEQUENCE LISTING SUBMITTED AS A TEXT FILE VIA EFS-WEB

[0003] The official copy of the sequence listing is submitted electronically via EFS-Web as an ASCII formatted sequence listing with a file named 431145SEQLIST.txt, created on Dec. 19, 2013, and having a size of 716 KB and is filed concurrently with the specification. The sequence listing contained in this ASCII formatted document is part of the specification and is herein incorporated by reference in its entirety.

### BACKGROUND OF THE INVENTION

[0004] In the commercial production of crops, it is desirable to easily and quickly eliminate unwanted plants (i.e., “weeds”) from a field of crop plants. An ideal treatment would be one which could be applied to an entire field but which would eliminate only the unwanted plants while leaving the crop plants unharmed. One such treatment system would involve the use of crop plants which are tolerant to a herbicide so that when the herbicide was sprayed on a field of herbicide-tolerant crop plants or an area of cultivation containing the crop, the crop plants would continue to thrive while non-herbicide-tolerant weeds were killed or severely damaged. Ideally, such treatment systems would take advantage of varying herbicide properties so that weed control could provide the best possible combination of flexibility and economy. For example, individual herbicides have different longevities in the field, and some herbicides persist and are effective for a relatively long time after they are applied to a field while other herbicides are quickly broken down into other and/or non-active compounds.

[0005] Crop tolerance to specific herbicides can be conferred by engineering genes into crops which encode appropriate herbicide metabolizing enzymes and/or insensitive herbicide targets. In some cases these enzymes, and the nucleic acids that encode them, originate in a plant. In other cases, they are derived from other organisms, such as microbes. See, e.g., Padgette et al. (1996) “New weed control opportunities: Development of soybeans with a Roundup Ready® gene” and Vasil (1996) “Phosphinothricin-resistant crops,” both in Herbicide-Resistant Crops, ed. Duke (CRC Press, Boca Raton, Fla.) pp. 54-84 and pp. 85-91. Indeed, transgenic plants have been engineered to express a variety of herbicide tolerance genes from a variety of organisms.

[0006] While a number of herbicide-tolerant crop plants are presently commercially available, improvements in every aspect of crop production, weed control options, extension of residual weed control, and improvement in crop yield are continuously in demand. Particularly, due to local and regional variation in dominant weed species, as well as, preferred crop species, a continuing need exists for customized systems of crop protection and weed management which can be adapted to the needs of a particular region, geography, and/or locality. A continuing need therefore exists for compositions and methods of crop protection and weed management.

### BRIEF SUMMARY OF THE INVENTION

[0007] Compositions and methods are provided to detoxify an auxin-analog herbicide through the use of at least one GH3 polypeptide having amino acid/auxin conjugation activity. Such GH3 polypeptides in the presence of an auxin-analog herbicide will produce an amino acid/auxin-analog conjugate having reduced herbicidal activity.

[0008] Various methods of employing the GH3 polypeptides and the polynucleotides encoding the same are provided. Such methods include methods to detoxify an auxin-analog herbicide comprising applying to a plant, a plant cell or a seed an auxin-analog herbicide, wherein the plant, plant cell or seed comprises a heterologous polynucleotide encoding a GH3 polypeptide having amino acid/auxin-analog conjugation activity, and wherein expression of the GH3 polypeptide produces an amino acid/auxin-analog conjugate having reduced herbicidal activity. Further methods include detoxifying a contaminated material having an auxin-analog herbicide by contacting the contaminated material with an effective amount of a host cell having the heterologous GH3 polypeptide.

[0009] Additional methods for controlling at least one weed in an area of cultivation comprising a crop or a seed of the crop are provided. The method comprises applying to the area of cultivation and/or applying to the crop or a seed of the crop in the area of cultivation a sufficient amount of an auxin-analog herbicide to control weeds without significantly affecting the crop, wherein the crop or seed thereof in the area of cultivation comprises a heterologous polynucleotide encoding a GH3 polypeptide having amino acid/auxin-analog conjugation activity.

### BRIEF DESCRIPTION OF THE DRAWINGS

[0010] FIG. 1 provides a schematic showing the formation of the aspartate/dicamba conjugate (A) and glutamate/dicamba conjugate (B) by a GH3 polypeptide having acyl-acid-amido synthetase activity.

[0011] FIG. 2 provides a schematic showing the formation of the aspartate/2,4-D conjugate (A) and glutamate/2,4-D conjugate (B) by a GH3 polypeptide having acyl-acid-amido synthetase activity.

[0012] FIG. 3 shows that soybean germination is not affected by auxin-analog conjugates of aspartate and glutamate.

[0013] FIGS. 4A, B and C provides the phylogenic relationship of the 246 GH3 polypeptides. The consensus tree was generated using CLUSTAL W and a bootstrap test with 1000 iterations (bootstrap values are indicated at each branch). Subgroups A, B, C were marked based on phylogenetic tree analysis.

[0014] FIG. 5 provides the phylogenic relationship of the 145 GH3 polypeptides using CLUSTAL W. The phylogenetic tree was inferred using the Neighbor-Joining method (Saitou and Nei (1987) Molecular Biology and Evolution 4:406-425). The optimal tree with the sum of branch length=17.20082290 is shown. The evolutionary distances were computed using the Poisson correction method (Zuckerkandl and Pauling (1965) In Evolving Genes and Proteins by Bryson and Vogel, pp. 97-166. Academic Press, New York) and are in the units of the number of amino acid substitutions per site. The analysis involved 145 amino acid sequences. All positions containing gaps and missing data were eliminated. There were a total of 112 positions in the final dataset. Evolutionary analyses were conducted in MEGA5 (Tamura et al. (2011) Molecular Biology and Evolution 28: 2731-2739). Subgroups A, B, and C were marked based on phylogenetic tree analysis. Circle: GH3 proteins tested for Asp and Glu conjugation activity with IAA, 2,4-D, and dicamba. Filled circle: GH3 proteins that are active 2,4-D conjugases with Asp and/or Glu.

[0015] FIG. 6 provides the phylogenic relationship of 78 activity tested GH3 polypeptides using CLUSTAL W. The phylogenetic tree was inferred using the Neighbor-Joining method (Saitou and Nei (1987) Molecular Biology and Evolution 4:406-425). The optimal tree with the sum of branch length=8.67906939 is shown. The tree is drawn to scale, with branch lengths in the same units as those of the evolutionary distances used to infer the phylogenetic tree. The evolutionary distances were computed using the Poisson correction method (Zuckerkandl and Pauling (1965) In Evolving Genes and Proteins by Bryson and Vogel, pp. 97-166. Academic Press, New York) and are in the units of the number of amino acid substitutions per site. All positions containing gaps and missing data were eliminated. There were a total of 212 positions in the final dataset. Evolutionary analyses were conducted in MEGA5 (Tamura et al., 2011. Molecular Biology and Evolution 28: 2731-2739). All 78 tested GH3 proteins have 2,4-D conjugation activity with Asp and/or Glu except ones marked with a filled diamond or a filled triangle. Open or filled diamond: GH3 proteins with no IAA conjugation activity to Asp or Glu; Open square: GH3 protein with dicamba conjugation activity to Glu. Subgroups A, B, and C were marked based on phylogenetic tree analysis.

[0016] FIG. 7 shows the dicamba-Glu conjugation activity of SEQ ID NO: 52 (PpGH3-2). PpGH3-2 is able to conjugate dicamba with glutamate. The amount of dicamba-Glu conjugates increases with increased amount of PpGH3-2 protein in the reaction.

### DETAILED DESCRIPTION OF THE INVENTION

[0017] The present inventions now will be described more fully hereinafter with reference to the accompanying drawings, in which some, but not all embodiments of the inventions are shown. Indeed, these inventions may be embodied in many different forms and should not be construed as limited to the embodiments set forth herein; rather, these embodiments are provided so that this disclosure will satisfy applicable legal requirements. Like numbers refer to like elements throughout.

[0018] Many modifications and other embodiments of the inventions set forth herein will come to mind to one skilled in the art to which these inventions pertain having the benefit of the teachings presented in the foregoing descriptions and the associated drawings. Therefore, it is to be understood that the inventions are not to be limited to the specific embodiments disclosed and that modifications and other embodiments are intended to be included within the scope of the appended claims. Although specific terms are employed herein, they are used in a generic and descriptive sense only and not for purposes of limitation.

### I. Detoxified Auxin-Analog Herbicides

[0019] Methods and compositions are provided to detoxify auxin-analog herbicides via amino acid conjugation. As demonstrated herein, converting an auxin-analog herbicide into an amino acid/auxin conjugate, such as an aspartate/auxin-analog conjugate and/or a glutamate/auxin-analog conjugate, reduces the herbicidal activity of the auxin-analog herbicide. As discussed in further detail herein, amino acid conjugation to the auxin-analog herbicide can be achieved through the use of at least one GH3 polypeptide or an active variant or fragment thereof.

[0020] Methods and compositions are provided to detoxify an auxin-analog herbicide. As used herein, “detoxify” or “detoxifying” an auxin-analog herbicide comprises any modification to the auxin-analog herbicide which reduces the herbicidal effect of the compound. A “reduced” herbicidal effect comprises any statistically significant decrease in the sensitivity of the plant or plant cell to the modified auxin-analog. The reduced herbicidal activity of a modified auxin-analog herbicide can be assayed in a variety of ways including, for example, assaying for the decreased sensitivity of a plant, a plant cell, or plant explant to the presence of the modified auxin-analog. See, for example, Example 2 provided herein. In such instances, the plant, plant cell, or plant explant will display a decreased sensitivity to the modified auxin-analog when compared to a control plant, plant cell, or plant explant which was contacted with the non-modified auxin-analog herbicide. Thus, in one example, a “reduced herbicidal effect” is demonstrated when plants display the increased tolerance to a modified auxin-analog and a dose/response curve is shifted to the right when compared to when the non-modified auxin-analog herbicide is applied. Such dose/response curves have “dose” plotted on the x-axis and “percentage injury”, “herbicidal effect” etc. plotted on the y-axis.

[0021] In one embodiment, methods and compositions are provided to detoxify an auxin-analog herbicide via amino acid conjugation. Auxin amino acid conjugation is a two-step enzymatic reaction. The first step involves adenylation: the transfer of AMP from ATP to the carboxylic acid group of an acyl substrate, forming an activated acyl-adenylate intermediate and releasing pyrophosphate (PPᵢ). The second step involves a transferase reaction replacing AMP of the intermediate with an amino acid by the formation of an amide bond. See FIGS. 1 and 2. In specific embodiments, the amino acid conjugated to the auxin-analog herbicide comprises an aspartate and/or a glutamate amino acid. In such embodiments, the detoxified auxin-analog comprises an aspartate/auxin-analog conjugate and/or a glutamate/auxin-analog conjugate. In still further embodiments, the detoxified auxin-analog comprises an aspartate/2,4-D conjugate and/or a glutamate/2,4-D conjugate, while in other embodiments, the detoxified auxin-analog comprises an aspartate/dicamba conjugate and/or a glutamate/dicamba conjugate. As used herein, the term “aspartate” and “glutamate” refer to the acid or the ester form of the amino acid. One of skill will recognize that the formation of the ester or the acid will depend on the conditions in which the amino acid is found.

[0022] It is further recognized that the amino acid conjugated to the auxin-analog herbicide need not be an aspartate and/or a glutamate amino acid. In some embodiments, the amino acid conjugated to the auxin-analog (including a 2,4-D conjugate or a dicamba conjugate) can comprises a histidine, isoleucine, leucine, lysine, methionine, phenylalanine, threonine, valine, tryptophan, alanine, tyrosine, glycine, glutamine, cysteine, asparagine, arginine, serine, and/or proline amino acid, or any combination thereof.

[0023] As used herein, an “auxin-analog herbicide” or “synthetic auxin herbicide” are used interchangeably and comprises any auxinic or growth regulator herbicides, otherwise known as Group 4 herbicides (based on their mode of action). These types of herbicides mimic or act like the natural plant growth regulators called auxins. The action of auxin-analog herbicide appears to affect cell wall plasticity and nucleic acid metabolism, which can lead to uncontrolled cell division and growth. See, for example, Cox et al. (1994) Journal of Pesticide Reform 14:30-35; Dayan et al. (2010) Weed Science 58:340-350; Davidonis et al. (1982) Plant Physiol 70:357-360; Mithila et al. (2011) Weed Science 59:445-457; Grossmann (2007) Plant Signalling and Behavior 2:421-423, U.S. Pat. No. 7,855,326; US App. Pub. 2012/0178627; US App. Pub. 2011/0124503; and U.S. Pat. No. 7,838,733, each of which is herein incorporated by reference.

[0024] Auxin-analog herbicides include the chemical families: phenoxy, carboxylic acid (or pyridine), benzoic acid, quinaline carboxylic acid, and aminocyclopyrachlor (MAT28). Phenoxy herbicides are most common and have been used as herbicides. One example of a phenoxy herbicide includes (2,4-dichlorophenoxy)acetic acid, otherwise known as 2,4-D. Other examples include 4-(2,4-dichlorophenoxy)butyric acid (2,4-DB), 2-(2,4-dichlorophenoxy)propanoic acid (2,4-DP), (2,4,5-trichlorophenoxy)acetic acid (2,4,5-T), 2-(2,4,5-Trichlorophenoxyl)Propionic Acid (2,4,5-TP), 2-(2,4-dichloro-3-methylphenoxy)-N-phenylpropanamide (clomeprop), (4-chloro-2-methylphenoxy)acetic acid (MCPA), 4-(4-chloro-o-tolyloxy)butyric acid (MCPB), and 2-(4-chloro-2-methylphenoxy)propanoic acid (MCPP).

[0025] The next largest chemical family is the carboxylic acid herbicides, also called pyridine herbicides. Examples include 3,6-dichloro-2-pyridinecarboxylic acid (Clopyralid), 4-amino-3,5,6-trichloro-2-pyridinecarboxylic acid (picloram), (2,4,5-trichlorophenoxy) acetic acid (triclopyr), and 4-amino-3,5-dichloro-6-fluoro-2-pyridyloxyacetic acid (fluoroxypyr).

[0026] Examples of benzoic acids include 3,6-dichloro-o-anisic acid (dicamba) and 3-amino-2,5-dichlorobenzoic acid (choramben). Dicamba is a particularly useful herbicide for use in the methods and compositions disclosed herein.

[0027] A fourth chemical family of auxin-analog herbicide is the quinaline carboxylic acid family. Example includes 3,7-dichloro-8-quinolinecarboxylic acid (quinclorac). This herbicide is unique in that it also will control some grass weeds, unlike the other auxin-analog herbicide which essentially control only broadleaf or dicotyledonous plants. The other herbicide in this category is 7-chloro-3-methyl-8-quinolinecarboxylic acid (quinmerac). In other embodiments, the auxin-analog herbicide comprises aminocyclopyrachlor, aminopyralid benazolin-ethyl, chloramben, clomeprop, clopyralid, dicamba, 2,4-D, 2,4-DB, dichlorprop, fluroxypyr, mecoprop, MCPA, MCPB, 2,3,6-TBA, picloram, triclopyr, quinclorac, or quinmerac. See, for example, WO2010/046422, WO2011/161131, WO2012/033548, and US Application Publications 20110287935, 20100069248, and 20100048399, each of which is herein incorporated by reference in their entirety.

[0028] While any auxin-analog herbicide can be employed in the methods and compositions disclosed herein, in one embodiment, the auxin-analog herbicide comprises dicamba or 2,4-D, and the detoxified auxin-analog herbicide comprises an aspartate/dicamba conjugate, a glutamate/dicamba conjugate, an aspartate/2,4-D conjugate and/or a glutamate/2,4-D conjugate.

### II. Methods of Forming an Amino Acid/Auxin-Analog Conjugate

[0029] For auxin-analog herbicides, the synthesis and degradation of amide conjugates was not known, particularly because 2,4-D and dicamba were not thought to be substrates of acyl amide synthetases (Staswick et al. (2005) Plant Cell 17:616-627; Chen et al. (2010) J Biol Chem 285:29780-29786) and such conjugates have not been found from plants. As demonstrated herein, auxin-analog herbicides can form amide conjugates and the conjugated aspartate/auxin-analogs and/or a glutamate/auxin-analogs are shown herein to display reduced herbicidal activity in plants.

[0030] i. GH3 Polypeptides and Polynucleotides Encoding the Same

[0031] Various methods can be employed to form the auxin-analog herbicide/amino acid conjugate. In one embodiment, a GH3 polypeptide is employed. The GH3 protein family comprises polypeptides having acyl-acid-amido synthetase activity and which catalyze the ATP-dependent formation of amino acid conjugates to modulate levels of at least one active plant compound, including, for example, auxin and/or jasmonates and/or benzoate substrates. The GH3 polypeptide employed in the methods and compositions disclosed herein will have acyl-acid-amido synthetase activity and catalyze, at least the formation of an amino acid/auxin-analog conjugate having reduced herbicidal activity. In more specific embodiments, the GH3 polypeptide having acyl-acid-amido activity will catalyze the formation of a glutamate/auxin-analog conjugate, an aspartate/auxin-analog conjugate, a glutamate/dicamba conjugate, an aspartate/dicamba conjugate, a glutamate/2,4-D conjugate and/or an aspartate/2,4-D conjugate; wherein the auxin-analog conjugate has reduced herbicidal activity.

[0032] Various GH3 polypeptides are known, previous studies of the substrate specificity of GH3 family of proteins has resulted in the GH3 protein family being characterized into three major subgroups. See, Staswick et al. (2002) Plant Cell 14: 1405-1415 and Wang et al. (2008) Plant Growth Regul 56:225-232, both of which are herein incorporated by reference. Subgroup I of the GH3 polypeptides catalyzes the ligation of amino acids to jasmonic acid (Staswick et al. (2002) Plant Cell 14: 1405-1415, herein incorporated by reference). Auxins such as IAA, PAA, IBA and salicylic acid are the substrates of subgroup II (Staswick et al. (2002) Plant Cell 14: 1405-1415; Staswick et al. (2005) Plant Cell 17:616-627, both of which are incorporated by reference). Subgroup III protein AtGH3-12 can conjugate 4-hydroxybenzoate, and other benzoates (Okrent et al. (2009) J Biol Chem 284:9742-9754). In another embodiment, the phylogenetic diversity of various GH3 polypeptides (Groups A, B and C) is set forth in FIGS. 4, 5 and 6.

[0033] Non-limiting examples of various GH3 enzymes are provided herein. Group I GH3 polypeptides include, for example, SEQ ID NOS: 15, 16, 17, 51, 52, 53, 54, 55, 56, 57, 59, 60, 61, 62, 63, 64, 65, 66, 67, 98, 99, 100, 101, 102, 103, 104, 105, 106, 107, 108, 109, 110, 111, 112, 113, 114, 115, 116, 122, 134, 135, 136, 137, 138, 139, 140, 141, and active variants and fragment thereof. Group II GH3 polypeptides include, for example, SEQ ID NOS: 1, 2, 3, 4, 5, 6, 7, 8, 9, 10, 11, 12, 13, 14, 33, 34, 35, 36, 37, 38, 39, 40, 41, 42, 43, 44, 45, 46, 47, 48, 49, 50, 58, 68, 69, 70, 71, 72, 73, 74, 75, 76, 77, 78, 79, 80, 81, 82, 83, 84, 85, 86, 87, 88, 89, 90, 91, 92, 93, 94, 95, 96, 97, 117, 118, 119, 120, 121, 124, 142, 144, 145, and active variants and fragments thereof. Group III GH3 polypeptides include, for example, SEQ ID NOS: 18, 19, 20, 21, 22, 23, 24, 25, 26, 27, 28, 29, 30, 31, 32, 123, 125, 126, 127, 128, 129, 130, 131, 132, 133, 143, and active variants and fragments thereof. Further provided are the polynucleotides encoding these various polypeptides and active variants and fragments thereof.

[0034] ii. Active Fragments and Variants of GH3 Sequences

[0035] Methods and compositions are provided which employ GH3 polypeptide having acyl-acid-amido activity that catalyze the formation of an amino acid/auxin-analog conjugate, such as a glutamate/auxin-analog conjugate and/or an aspartate/auxin-analog conjugate, wherein the auxin-analog conjugate has reduced herbicidal activity.

[0036] iii. Polynucleotide and Polypeptide Fragments

[0037] Fragments and variants of GH3 polynucleotides and polypeptides can be employed in the methods and compositions disclosed herein. By “fragment” is intended a portion of the polynucleotide or a portion of the amino acid sequence and hence protein encoded thereby. Fragments of a polynucleotide may encode protein fragments that retain the acyl-acid-amido activity and the ability to catalyze the formation of a glutamate/auxin-analog conjugate, and/or an aspartate/auxin-analog conjugate, wherein the auxin-analog conjugate has reduced herbicidal activity. Thus, fragments of a nucleotide sequence may range from at least about 20 nucleotides, about 50 nucleotides, about 100 nucleotides, and up to the full-length polynucleotide encoding the GH3 polypeptides.

[0038] A fragment of a GH3 polynucleotide that encodes a biologically active portion of a GH3 polypeptide will encode at least 50, 75, 100, 150, 175, 200, 225, 250, 275, 300, 325, 350, 375, 400, 410, 415, 420, 425, 430, 435, 440, 480, 500, 550, 600, 620 contiguous amino acids, or up to the total number of amino acids present in a full-length GH3 polypeptide as set forth in, for example, SEQ ID NO: 1, 2, 3, 4, 5, 6, 7, 8, 9, 10, 11, 12, 13, 14, 15, 16, 17, 18, 19, 20, 21, 22, 23, 24, 25, 26, 27, 28, 29, 30, 31, 32, 33, 34, 35, 36, 37, 38, 39, 40, 41, 42, 43, 44, 45, 46, 47, 48, 49, 50, 51, 52, 53, 54, 55, 56, 57, 58, 59, 60, 61, 62, 63, 64, 65, 66, 67, 68, 69, 70, 71, 72, 73, 74, 75, 76, 77, 78, 79, 80, 81, 82, 83, 84, 85, 86, 87, 88, 89, 90, 91, 92, 93, 94, 95, 96, 97, 98, 99, 100, 101, 102, 103, 104, 105, 106, 107, 108, 109, 110, 111, 112, 113, 114, 115, 116, 117, 118, 119, 120, 121, 122, 123, 124, 125, 126, 127, 128, 129, 130, 131, 132, 133, 134, 135, 136, 137, 138, 139, 140, 141, 142, 143, 144, or 145.

[0039] Thus, a fragment of a GH3 polynucleotide encodes a biologically active portion of a GH3 polypeptide. A biologically active portion of a GH3 polypeptide can be prepared by isolating a portion of one of the polynucleotides encoding a GH3 polypeptide, expressing the encoded portion of the GH3 polypeptides (e.g., by recombinant expression in vitro), and assessing for acyl-acid-amido activity and the ability to catalyze the formation of a glutamate/auxin-analog conjugate, and/or an aspartate/auxin-analog conjugate, wherein the amino acid auxin-analog conjugate has reduced herbicidal activity. Polynucleotides that are fragments of a GH3 nucleotide sequence comprise at least 16, 20, 50, 75, 100, 150, 200, 250, 300, 350, 400, 450, 500, 550, 600, 650, 700, 800, 900, 1,000, 1,100, 1,200, 1,300, or 1,400 contiguous nucleotides, or up to the number of nucleotides present in a full-length Polynucleotide encoding a GH3 polypeptide disclosed herein.

[0040] iv. Polynucleotide and Polypeptide Variants

[0041] “Variant” protein is intended to mean a protein derived from the protein by deletion (i.e., truncation at the 5′ and/or 3′ end) and/or a deletion or addition of one or more amino acids at one or more internal sites in the native protein and/or substitution of one or more amino acids at one or more sites in the native protein. Variant proteins encompassed are biologically active, that is they continue to possess the desired biological activity of the native protein, that is, having acyl-acid-amido activity and the ability to catalyze the formation of an amino acid/auxin conjugate, such as a glutamate/auxin-analog conjugate and/or an aspartate/auxin-analog conjugate, wherein the amino acid/auxin-analog conjugate has reduced herbicidal activity.

[0042] “Variants” is intended to mean substantially similar sequences. For polynucleotides, a variant comprises a polynucleotide having a deletion (i.e., truncations) at the 5′ and/or 3′ end and/or a deletion and/or addition of one or more nucleotides at one or more internal sites within the native polynucleotide and/or a substitution of one or more nucleotides at one or more sites in the native polynucleotide. As used herein, a “native” polynucleotide or polypeptide comprises a naturally occurring nucleotide sequence or amino acid sequence, respectively. For polynucleotides, conservative variants include those sequences that, because of the degeneracy of the genetic code, encode the amino acid sequence of one of the GH3 polypeptides. Naturally occurring variants such as these can be identified with the use of well-known molecular biology techniques, as, for example, with polymerase chain reaction (PCR) and hybridization techniques, and sequencing techniques as outlined below. Variant polynucleotides also include synthetically derived polynucleotides, such as those generated, for example, by using site-directed mutagenesis or gene synthesis but which still encode a GH3 polypeptide.

[0043] Biologically active variants of a GH3 polypeptide (and the polynucleotide encoding the same) will have at least about 80%, 85%, 86%, 87%, 88%, 89%, 90%, 91%, 92%, 93%, 94%, 95%, 95.7%, 96%, 97%, 98%, 99%, or more sequence identity to the polypeptide of any one of SEQ ID NO: 1, 2, 3, 4, 5, 6, 7, 8, 9, 10, 11, 12, 13, 14, 15, 16, 17, 18, 19, 20, 21, 22, 23, 24, 25, 26, 27, 28, 29, 30, 31, 32, 33, 34, 35, 36, 37, 38, 39, 40, 41, 42, 43, 44, 45, 46, 47, 48, 49, 50, 51, 52, 53, 54, 55, 56, 57, 58, 59, 60, 61, 62, 63, 64, 65, 66, 67, 68, 69, 70, 71, 72, 73, 74, 75, 76, 77, 78, 79, 80, 81, 82, 83, 84, 85, 86, 87, 88, 89, 90, 91, 92, 93, 94, 95, 96, 97, 98, 99, 100, 101, 102, 103, 104, 105, 106, 107, 108, 109, 110, 111, 112, 113, 114, 115, 116, 117, 118, 119, 120, 121, 122, 123, 124, 125, 126, 127, 128, 129, 130, 131, 132, 133, 134, 135, 136, 137, 138, 139, 140, 141, 142, 143, 144, or 145 as determined by sequence alignment programs and parameters described elsewhere herein.

[0044] The GH3 polypeptides and the active variants and fragments thereof may be altered in various ways including amino acid substitutions, deletions, truncations, and insertions. Methods for such manipulations are generally known in the art. For example, amino acid sequence variants and fragments of the GH3 polypeptides can be prepared by mutations in the DNA. Methods for mutagenesis and polynucleotide alterations are well known in the art. See, for example, Kunkel (1985) Proc. Natl. Acad. Sci. USA 82:488-492; Kunkel et al. (1987) Methods in Enzymol. 154:367-382; U.S. Pat. No. 4,873,192; Walker and Gaastra, eds. (1983) Techniques in Molecular Biology (MacMillan Publishing Company, New York) and the references cited therein. Guidance as to appropriate amino acid substitutions that do not affect biological activity of the protein of interest may be found in the model of Dayhoff et al. (1978) Atlas of Protein Sequence and Structure (Natl. Biomed. Res. Found. Washington, D.C.), herein incorporated by reference. Conservative substitutions, such as exchanging one amino acid with another having similar properties, may be optimal.

[0045] Obviously, the mutations that will be made in the DNA encoding the variant must not place the sequence out of reading frame and optimally will not create complementary regions that could produce secondary mRNA structure. See, EP Patent Application Publication No. 75,444.

### III. Host Cells, Plants and Plant Parts

[0046] Host cells, plants, plant cells, plant parts and seeds, and grain having a heterologous copy of the GH3 sequences disclosed herein are provided. It is expected that those of skill in the art are knowledgeable in the numerous systems available for the introduction of a polypeptide or a nucleotide sequence disclosed herein into a host cell. No attempt to describe in detail the various methods known for providing sequences in prokaryotes or eukaryotes will be made.

[0047] By “host cell” is meant a cell which comprises a heterologous GH3 sequence. Host cells may be prokaryotic cells, such as E. coli, or eukaryotic cells such as yeast cells. Host cells can also be monocotyledonous or dicotyledonous plant cells.

[0048] In specific embodiments, the host cells, plants and/or plant parts have stably incorporated at least one heterologous polynucleotide encoding a GH3 polypeptide or an active variant or fragment thereof. Thus, host cells, plants, plant cells, plant parts and seed are provided which comprise at least one heterologous polynucleotide encoding a GH3 polypeptide of any one of SEQ ID NOS: SEQ ID NO: 1, 2, 3, 4, 5, 6, 7, 8, 9, 10, 11, 12, 13, 14, 15, 16, 17, 18, 19, 20, 21, 22, 23, 24, 25, 26, 27, 28, 29, 30, 31, 32, 33, 34, 35, 36, 37, 38, 39, 40, 41, 42, 43, 44, 45, 46, 47, 48, 49, 50, 51, 52, 53, 54, 55, 56, 57, 58, 59, 60, 61, 62, 63, 74, 65, 66, 67, 68, 69, 70, 71, 72, 73, 74, 75, 76, 77, 78, 79, 80, 81, 82, 83, 84, 85, 86, 87, 88, 89, 90, 61, 92, 93, 94, 95, 96, 97, 98, 99, 100, 101, 102, 103, 104, 105, 106, 107, 108, 109, 110, 111, 112, 113, 114, 115, 116, 117, 118, 119, 120, 121, 122, 123, 124, 125, 126, 127, 128, 129, 130, 131, 132, 133, 134, 135, 136, 137, 138, 139, 140, 141, 142, 143, 144, or 145 and/or an active fragment and/or variant thereof. The GH3 polypeptides have acyl-acid-amido activity, and therefore have the ability to catalyze the formation of an amino acid/auxin-analog conjugate, such as a glutamate/auxin-analog conjugate and/or an aspartate/auxin-analog conjugate, wherein the amino acid/auxin-analog conjugate has reduced herbicidal activity.

[0049] Thus, the host cell, plants, plant cells and seed which express the heterologous polynucleotide encoding the GH3 polypeptide can display an increased tolerance to the auxin-analog herbicide. “Increased tolerance” to a herbicide is demonstrated when plants which display the increased tolerance to a herbicide are subjected to the auxin-analog herbicide and a dose/response curve is shifted to the right when compared with that provided by an appropriate control plant. Such dose/response curves have “dose” plotted on the x-axis and “percentage injury”, “herbicidal effect” etc. plotted on the y-axis. Plants which are substantially “resistant” or “tolerant” to the herbicide exhibit few, if any, significant negative agronomic effects when subjected to the herbicide at concentrations and rates which are typically employed by the agricultural community to kill weeds in the field.

[0050] In specific embodiments, the heterologous polynucleotide encoding the GH3 polypeptide or active variant or fragment thereof in the host cell, plant or plant part is operably linked to a constitutive, tissue-preferred, or other promoter for expression in the host cell or the plant of interest.

[0051] As used herein, the term plant includes plant cells, plant protoplasts, plant cell tissue cultures from which plants can be regenerated, plant calli, plant clumps, and plant cells that are intact in plants or parts of plants such as embryos, pollen, ovules, seeds, leaves, flowers, branches, fruit, kernels, ears, cobs, husks, stalks, roots, root tips, anthers, and the like. Grain is intended to mean the mature seed produced by commercial growers for purposes other than growing or reproducing the species. Progeny, variants, and mutants of the regenerated plants are also included within the scope of the invention, provided that these parts comprise the introduced polynucleotides.

[0052] The polynucleotide encoding the GH3 polypeptide and active variants and fragments thereof may be used for transformation of any plant species, including, but not limited to, monocots and dicots. Examples of plant species of interest include, but are not limited to, corn (Zea mays), Brassica sp. (e.g., B. napus, B. rapa, B. juncea), particularly those Brassica species useful as sources of seed oil, alfalfa (Medicago sativa), rice (Oryza sativa), rye (Secale cereale), sorghum (Sorghum bicolor, Sorghum vulgare), millet (e.g., pearl millet (Pennisetum glaucum), proso millet (Panicum miliaceum), foxtail millet (Setaria italica), finger millet (Eleusine coracana)), sunflower (Helianthus annuus), safflower (Carthamus tinctorius), wheat (Triticum aestivum), soybean (Glycine max), tobacco (Nicotiana tabacum), potato (Solanum tuberosum), peanuts (Arachis hypogaea), cotton (Gossypium barbadense, Gossypium hirsutum), sweet potato (Ipomoea batatus), cassava (Manihot esculenta), coffee (Coffea spp.), coconut (Cocos nucifera), pineapple (Ananas comosus), citrus trees (Citrus spp.), cocoa (Theobroma cacao), tea (Camellia sinensis), banana (Musa spp.), avocado (Persea americana), fig (Ficus casica), guava (Psidium guajava), mango (Mangifera indica), olive (Olea europaea), papaya (Carica papaya), cashew (Anacardium occidentale), macadamia (Macadamia integrifolia), almond (Prunus amygdalus), sugar beets (Beta vulgaris), sugarcane (Saccharum spp.), oats, barley, vegetables, ornamentals, and conifers.

[0053] Vegetables include tomatoes (Lycopersicon esculentum), lettuce (e.g., Lactuca sativa), green beans (Phaseolus vulgaris), lima beans (Phaseolus limensis), peas (Lathyrus spp.), and members of the genus Cucumis such as cucumber (C. sativus), cantaloupe (C. cantalupensis), and musk melon (C. melo). Ornamentals include azalea (Rhododendron spp.), hydrangea (Macrophylla hydrangea), hibiscus (Hibiscus rosasanensis), roses (Rosa spp.), tulips (Tulipa spp.), daffodils (Narcissus spp.), petunias (Petunia hybrida), carnation (Dianthus caryophyllus), poinsettia (Euphorbia pulcherrima), and chrysanthemum.

[0054] Conifers that may be employed in practicing the present invention include, for example, pines such as loblolly pine (Pinus taeda), slash pine (Pinus elliotii), ponderosa pine (Pinus ponderosa), lodgepole pine (Pinus contorta), and Monterey pine (Pinus radiata); Douglas-fir (Pseudotsuga menziesii); Western hemlock (Tsuga canadensis); Sitka spruce (Picea glauca); redwood (Sequoia sempervirens); true firs such as silver fir (Abies amabilis) and balsam fir (Abies balsamea); and cedars such as Western red cedar (Thuja plicata) and Alaska yellow-cedar (Chamaecyparis nootkatensis), and Poplar and Eucalyptus. In specific embodiments, plants of the present invention are crop plants (for example, corn, alfalfa, sunflower, Brassica, soybean, cotton, safflower, peanut, sorghum, wheat, millet, tobacco, etc.).

[0055] In other embodiments, corn and soybean plants are of interest.

[0056] Other plants of interest include grain plants that provide seeds of interest, oil-seed plants, and leguminous plants. Seeds of interest include grain seeds, such as corn, wheat, barley, rice, sorghum, rye, etc. Oil-seed plants include cotton, soybean, safflower, sunflower, Brassica, maize, alfalfa, palm, coconut, etc. Leguminous plants include beans and peas. Beans include guar, locust bean, fenugreek, soybean, garden beans, cowpea, mung bean, lima bean, fava bean, lentils, chickpea, etc.

[0057] A “subject plant or plant cell” is one in which genetic alteration, such as transformation, has been affected as to a gene of interest, or is a plant or plant cell which is descended from a plant or cell so altered and which comprises the alteration. A “control” or “control plant” or “control plant cell” provides a reference point for measuring changes in phenotype of the subject plant or plant cell.

[0058] A control plant or plant cell may comprise, for example: (a) a wild-type plant or cell, i.e., of the same germplasm, variety or line as the starting material for the genetic alteration which resulted in the subject plant or cell; (b) a plant or plant cell of the same genotype as the starting material but which has been transformed with a null construct (i.e. with a construct which has no known effect on the trait of interest, such as a construct comprising a marker gene); (c) a plant or plant cell which is a non-transformed segregant among progeny of a subject plant or plant cell; (d) a plant or plant cell genetically identical to the subject plant or plant cell but which is not exposed to conditions or stimuli that would induce expression of the gene of interest; or (e) the subject plant or plant cell itself, under conditions in which the gene of interest is not expressed.

### IV. Polynucleotide Constructs

[0059] The use of the term “polynucleotide” is not intended to limit the methods and compositions to polynucleotides comprising DNA. Those of ordinary skill in the art will recognize that polynucleotides can comprise ribonucleotides and combinations of ribonucleotides and deoxyribonucleotides. Such deoxyribonucleotides and ribonucleotides include both naturally occurring molecules and synthetic analogues. The polynucleotides employed herein also encompass all forms of sequences including, but not limited to, single-stranded forms, double-stranded forms, hairpins, stem-and-loop structures, and the like.

[0060] The polynucleotides encoding a GH3 polypeptide or active variant or fragment thereof can be provided in expression cassettes for expression in the plant of interest. The cassette can include 5′ and 3′ regulatory sequences operably linked to a polynucleotide encoding a GH3 polypeptide or an active variant or fragment thereof “Operably linked” is intended to mean a functional linkage between two or more elements. For example, an operable linkage between a polynucleotide of interest and a regulatory sequence (i.e., a promoter) is a functional link that allows for expression of the polynucleotide of interest. Operably linked elements may be contiguous or non-contiguous. When used to refer to the joining of two protein coding regions, by operably linked is intended that the coding regions are in the same reading frame. Additional gene(s) can be provided on multiple expression cassettes. Such an expression cassette is provided with a plurality of restriction sites and/or recombination sites for insertion of the polynucleotide encoding a GH3 polypeptide or an active variant or fragment thereof to be under the transcriptional regulation of the regulatory regions.

[0061] The expression cassette can include in the 5′-3′ direction of transcription, a transcriptional and translational initiation region (i.e., a promoter), a polynucleotide encoding a GH3 polypeptide or an active variant or fragment thereof, and a transcriptional and translational termination region (i.e., termination region) functional in plants. The regulatory regions (i.e., promoters, transcriptional regulatory regions, and translational termination regions) and/or the polynucleotide encoding a GH3 polypeptide or an active variant or fragment thereof may be native/analogous to the host cell or to each other. Alternatively, the regulatory regions and/or the polynucleotide encoding the GH3 polypeptide of or an active variant or fragment thereof may be heterologous to the host cell or to each other. Moreover, as discussed in further detail elsewhere herein, the polynucleotide encoding the GH3 polypeptide can further comprise a polynucleotide encoding a “targeting signal” that will direct the GH3 polypeptide to a desired sub-cellular location.

[0062] As used herein, “heterologous” in reference to a sequence is a sequence that originates from a foreign species, or, if from the same species, is modified from its native form in composition and/or genomic locus by deliberate human intervention. For example, a promoter operably linked to a heterologous polynucleotide is from a species different from the species from which the polynucleotide was derived, or, if from the same/analogous species, one or both are modified from their original form and/or genomic locus, or the promoter is not the native promoter for the operably linked polynucleotide.

[0063] While it may be optimal to express the sequences using heterologous promoters, the native promoter sequences may be used. Such constructs can change expression levels of the polynucleotide encoding a GH3 polypeptide in the host cell, plant or plant cell. Thus, the phenotype of the host cell, plant or plant cell can be altered.

[0064] The termination region may be native with the transcriptional initiation region, may be native with the operably linked polynucleotide encoding a GH3 polypeptide or active variant or fragment thereof, may be native with the host cell (i.e., plant cell), or may be derived from another source (i.e., foreign or heterologous) to the promoter, the Polynucleotide encoding a GH3 polypeptide or active fragment or variant thereof, the plant host, or any combination thereof. Convenient termination regions are available from the Ti-plasmid of A. tumefaciens, such as the octopine synthase and nopaline synthase termination regions. See also Guerineau et al. (1991) Mol. Gen. Genet. 262:141-144; Proudfoot (1991) Cell 64:671-674; Sanfacon et al. (1991) Genes Dev. 5:141-149; Mogen et al. (1990) Plant Cell 2:1261-1272; Munroe et al. (1990) Gene 91:151-158; Ballas et al. (1989) Nucleic Acids Res. 17:7891-7903; and Joshi et al. (1987) Nucleic Acids Res. 15:9627-9639.

[0065] Where appropriate, the polynucleotides may be optimized for increased expression in the transformed host cell (i.e., a plant cell). In specific embodiments, the polynucleotides can be synthesized using plant-preferred codons for improved expression. See, for example, Campbell and Gowri (1990) Plant Physiol. 92:1-11 for a discussion of host-preferred codon usage. Methods are available in the art for synthesizing plant-preferred genes. See, for example, U.S. Pat. Nos. 5,380,831, and 5,436,391, and Murray et al. (1989) Nucleic Acids Res. 17:477-498, herein incorporated by reference.

[0066] Additional sequence modifications are known to enhance gene expression in a cellular host. These include elimination of sequences encoding spurious polyadenylation signals, exon-intron splice site signals, transposon-like repeats, and other such well-characterized sequences that may be deleterious to gene expression. The G-C content of the sequence may be adjusted to levels average for a given cellular host, as calculated by reference to known genes expressed in the host cell. When possible, the sequence is modified to avoid predicted hairpin secondary mRNA structures.

[0067] The expression cassettes may additionally contain 5′ leader sequences. Such leader sequences can act to enhance translation. Translation leaders are known in the art and include: picornavirus leaders, for example, EMCV leader (Encephalomyocarditis 5′ noncoding region) (Elroy-Stein et al. (1989) Proc. Natl. Acad. Sci. USA 86:6126-6130); potyvirus leaders, for example, TEV leader (Tobacco Etch Virus) (Gallie et al. (1995) Gene 165(2):233-238), MDMV leader (Maize Dwarf Mosaic Virus) (Virology 154:9-20), and human immunoglobulin heavy-chain binding protein (BiP) (Macejak et al. (1991) Nature 353:90-94); untranslated leader from the coat protein mRNA of alfalfa mosaic virus (AMV RNA 4) (Jobling et al. (1987) Nature 325:622-625); tobacco mosaic virus leader (TMV) (Gallie et al. (1989) in Molecular Biology of RNA, ed. Cech (Liss, New York), pp. 237-256); and maize chlorotic mottle virus leader (MCMV) (Lommel et al. (1991) Virology 81:382-385. See also, Della-Cioppa et al. (1987) Plant Physiol. 84:965-968.

[0068] In preparing the expression cassette, the various DNA fragments may be manipulated, so as to provide for the DNA sequences in the proper orientation and, as appropriate, in the proper reading frame. Toward this end, adapters or linkers may be employed to join the DNA fragments or other manipulations may be involved to provide for convenient restriction sites, removal of superfluous DNA, removal of restriction sites, or the like. For this purpose, in vitro mutagenesis, primer repair, restriction, annealing, resubstitutions, e.g., transitions and transversions, may be involved.

[0069] A number of promoters can be used to express the various GH3 sequences disclosed herein, including the native promoter of the polynucleotide sequence of interest. The promoters can be selected based on the desired outcome. Such promoters include, for example, constitutive, tissue-preferred, or other promoters for expression in plants.

[0070] Constitutive promoters include, for example, the core promoter of the Rsyn7 promoter and other constitutive promoters disclosed in WO 99/43838 and U.S. Pat. No. 6,072,050; the core CaMV 35S promoter (Odell et al. (1985) Nature 313:810-812); rice actin (McElroy et al. (1990) Plant Cell 2:163-171); ubiquitin (Christensen et al. (1989) Plant Mol. Biol. 12:619-632 and Christensen et al. (1992) Plant Mol. Biol. 18:675-689); pEMU (Last et al. (1991) Theor. Appl. Genet. 81:581-588); MAS (Velten et al. (1984) EMBO J. 3:2723-2730); ALS promoter (U.S. Pat. No. 5,659,026); and the like. Other constitutive promoters include, for example, U.S. Pat. Nos. 5,608,149; 5,608,144; 5,604,121; 5,569,597; 5,466,785; 5,399,680; 5,268,463; 5,608,142; and 6,177,611.

[0071] Tissue-preferred promoters can be utilized to target enhanced expression of the polynucleotide encoding the GH3 polypeptide within a particular plant tissue. Tissue-preferred promoters include those described in Yamamoto et al. (1997) Plant J. 12(2):255-265; Kawamata et al. (1997) Plant Cell Physiol. 38(7):792-803; Hansen et al. (1997) Mol. Gen Genet. 254(3):337-343; Russell et al. (1997) Transgenic Res. 6(2):157-168; Rinehart et al. (1996) Plant Physiol. 112(3):1331-1341; Van Camp et al. (1996) Plant Physiol. 112(2):525-535; Canevascini et al. (1996) Plant Physiol. 112(2):513-524; Yamamoto et al. (1994) Plant Cell Physiol. 35(5):773-778; Lam (1994) Results Probl. Cell Differ. 20:181-196; Orozco et al. (1993) Plant Mol Biol. 23(6):1129-1138; Matsuoka et al. (1993) Proc Natl. Acad. Sci. USA 90(20):9586-9590; and Guevara-Garcia et al. (1993) Plant J. 4(3):495-505. Such promoters can be modified, if necessary, for weak expression.

[0072] Leaf-preferred promoters are known in the art. See, for example, Yamamoto et al. (1997) Plant J. 12(2):255-265; Kwon et al. (1994) Plant Physiol. 105:357-67; Yamamoto et al. (1994) Plant Cell Physiol. 35(5):773-778; Gotor et al. (1993) Plant J. 3:509-18; Orozco et al. (1993) Plant Mol. Biol. 23(6):1129-1138; and Matsuoka et al. (1993) Proc. Natl. Acad. Sci. USA 90(20):9586-9590.

[0073] Meristem-preferred promoters can also be employed. Such promoter can drive expression in meristematic tissue, including, for example, the apical meristem, axillary buds, root meristems, cotyledon meristem and/or hypocotyl meristem. Non-limiting examples of meristem-preferred promoters include the shoot meristem specific promoter such as the Arabidopsis UFO gene promoter (Unusual Floral Organ) (USA6239329), the meristem-specific promoters of FTM1, 2, 3 and SVP1, 2, 3 genes as discussed in US Patent App. 20120255064, and the shoot meristem-specific promoter disclosed in U.S. Pat. No. 5,880,330. Each of these references is herein incorporated by reference in their entirety.

[0074] The expression cassette can also comprise a selectable marker gene for the selection of transformed cells. Selectable marker genes are utilized for the selection of transformed cells or tissues. Marker genes include genes encoding antibiotic resistance, such as those encoding neomycin phosphotransferase II (NEO) and hygromycin phosphotransferase (HPT), as well as genes conferring resistance to herbicidal compounds, such as glyphosate, glufosinate ammonium, bromoxynil, sulfonylureas. Additional selectable markers include phenotypic markers such as β-galactosidase and fluorescent proteins such as green fluorescent protein (GFP) (Su et al. (2004) Biotechnol Bioeng 85:610-9 and Fetter et al. (2004) Plant Cell 16:215-28), cyan florescent protein (CYP) (Bolte et al. (2004) J. Cell Science 117:943-54 and Kato et al. (2002) Plant Physiol 129:913-42), and yellow florescent protein (PhiYFP™ from Evrogen, see, Bolte et al. (2004) J. Cell Science 117:943-54). For additional selectable markers, see generally, Yarranton (1992) Curr. Opin. Biotech. 3:506-511; Christopherson et al. (1992) Proc. Natl. Acad. Sci. USA 89:6314-6318; Yao et al. (1992) Cell 71:63-72; Reznikoff (1992) Mol. Microbiol. 6:2419-2422; Barkley et al. (1980) in The Operon, pp. 177-220; Hu et al. (1987) Cell 48:555-566; Brown et al. (1987) Cell 49:603-612; Figge et al. (1988) Cell 52:713-722; Deuschle et al. (1989) Proc. Natl. Acad. Sci. USA 86:5400-5404; Fuerst et al. (1989) Proc. Natl. Acad. Sci. USA 86:2549-2553; Deuschle et al. (1990) Science 248:480-483; Gossen (1993) Ph.D. Thesis, University of Heidelberg; Reines et al. (1993) Proc. Natl. Acad. Sci. USA 90:1917-1921; Labow et al. (1990) Mol. Cell. Biol. 10:3343-3356; Zambretti et al. (1992) Proc. Natl. Acad. Sci. USA 89:3952-3956; Baim et al. (1991) Proc. Natl. Acad. Sci. USA 88:5072-5076; Wyborski et al. (1991) Nucleic Acids Res. 19:4647-4653; Hillenand-Wissman (1989) Topics Mol. Struc. Biol. 10:143-162; Degenkolb et al. (1991) Antimicrob. Agents Chemother. 35:1591-1595; Kleinschnidt et al. (1988) Biochemistry 27:1094-1104; Bonin (1993) Ph.D. Thesis, University of Heidelberg; Gossen et al. (1992) Proc. Natl. Acad. Sci. USA 89:5547-5551; Oliva et al. (1992) Antimicrob. Agents Chemother. 36:913-919; Hlavka et al. (1985) Handbook of Experimental Pharmacology, Vol. 78 (Springer-Verlag, Berlin); Gill et al. (1988) Nature 334:721-724. Such disclosures are herein incorporated by reference. The above list of selectable marker genes is not meant to be limiting.

[0075] While the expression of a GH3 polypeptide or active variant or fragment thereof may be targeted to specific plant tissues or cell types through the use of appropriate promoters, it may also be targeted to different locations within the cell through the use of targeting information or “targeting labels.” Unlike the promoter, which acts at the transcriptional level, such targeting information is part of the initial translation product. Thus, in specific embodiments, the various GH3 polypeptides or active variants and fragments thereof, are expressed such that the GH3 polypeptide is targeted to a sub-cellular location, such as a plastid, a chloroplast, a vacuole, the endoplasmic reticulum (ER), a mitochondria, and/or the nucleus.

[0076] For example, one may produce a protein preceded by a signal peptide, which directs the translation product into the endoplasmic reticulum, by including in the construct (i.e. expression cassette) sequences encoding a signal peptide (such sequences may also be called the “signal sequence”). The signal sequence could be, for example, one associated with the gene encoding the GH3 polypeptide, or it may be taken from another gene and thereby be heterologous to the GH3 sequence. There are many signal peptides described in the literature. See, for example, Raikhel and Chrispeels, “Protein sorting and vesicle traffic” in Buchanan et al., eds., (2000) Biochemistry and Molecular Biology of Plants (American Society of Plant Physiologists, Rockville, Md.), herein incorporated by reference. The addition of a signal peptide will result in the translation product entering the endoplasmic reticulum (in the process of which the signal peptide itself is removed from the polypeptide). The final intracellular location of the protein depends on other factors, which may be manipulated to result in a desired cellular for the GH3 polypeptide or active variant or fragment thereof. The default pathway, that is, the pathway taken by the polypeptide if no other targeting labels are included, results in secretion of the polypeptide across the cell membrane into the apoplast. The apoplast is the region outside the plasma membrane system and includes cell walls, intercellular spaces, and the xylem vessels that form a continuous, permeable system through which water and solutes may move.

[0077] In specific embodiments, the GH3 polypeptide or active variant or fragment thereof is located within the cell rather than outside the cell membrane. This can be accomplished, for example, by adding a polynucleotide encoding an endoplasmic reticulum retention signal sequence to the sequence of the GH3 polypeptide. Methods and sequences for doing this are described in Raikhel and Chrispeels, supra; for example, adding sequences encoding the amino acids K, D, E and L in that order, or variations thereof described in the literature, to the end of the protein coding portion of the polypeptide will accomplish this. ER retention sequences are well known in the art and include those set forth in U.S. Pat. No. 7,772,370 and, for example, in Denecke et al. (1992). EMBO J. 11:2345-2355; Wandelt et al. (1992) Plant J. 2:181-192; Denecke et al. (1993) J. Exp. Bot. 44:213-221; Vitale et al. (1993) J. Exp. Bot. 44:1417-1444; Gomord et al. (1996) Plant Physiol. Biochem. 34:165-181; Lehmann et al. (2001) Plant Physiol. 127 (2): 436-449.

[0078] Alternatively, the use of vacuolar targeting labels such as those described by Raikhel and Chrispeels, supra, in addition to a signal peptide will result in localization of the peptide in a vacuolar structure. As described in Raikhel and Chrispeels, supra, the vacuolar targeting label may be placed in different positions in the construct.

[0079] Use of a plastid transit peptide encoding sequence instead of a signal peptide encoding sequence will result in localization of the polypeptide in the plastid of the cell type chosen (Raikhel and Chrispeels, supra). Such transit peptides are known in the art. See, for example, Von Heijne et al. (1991) Plant Mol. Biol. Rep. 9:104-126; Clark et al. (1989) J. Biol. Chem. 264:17544-17550; Della-Cioppa et al. (1987) Plant Physiol. 84:965-968; Romer et al. (1993) Biochem. Biophys. Res. Comm. 196:1414-1421; and Shah et al. (1986) Science 233:478-481. Chloroplast targeting sequences that encode such transit peptides are also known in the art and include the chloroplast small subunit of ribulose-1,5-bisphosphate carboxylase (Rubisco) (de Castro Silva Filho et al. (1996) Plant Mol. Biol. 30:769-780; Schnell et al. (1991) J. Biol. Chem. 266(5):3335-3342); 5-(enolpyruvyl)shikimate-3-phosphate synthase (EPSPS) (Archer et al. (1990) J. Bioenerg. Biomemb. 22(6):789-810); tryptophan synthase (Zhao et al. (1995) J. Biol. Chem. 270(11):6081-6087); plastocyanin (Lawrence et al. (1997) J. Biol. Chem. 272(33):20357-20363); chorismate synthase (Schmidt et al. (1993) J. Biol. Chem. 268(36):27447-27457); and the light harvesting chlorophyll a/b binding protein (LHBP) (Lamppa et al. (1988) J. Biol. Chem. 263:14996-14999), and the various chloroplast targeting sequences set forth in US App. Publication 2012-0304336, each of which is herein incorporated by reference.

[0080] One could also envision localizing the polypeptide in other cellular compartments by addition of suitable targeting information. (Raikhel and Chrispeels, supra). A useful site that provides information and references regarding recognition of the various targeting sequences can be found at: psort.nibb.acjp/mit. Other references regarding the state of the art of protein targeting include Silva-Filho (2003) Curr. Opin. Plant Biol. 6:589-595; Nicchitta (2002) Curr. Opin. Cell Biol. 14:412-416; Bruce (2001) Biochim Biophys Acta 1541: 2-21; Hadlington & Denecke (2000) Curr. Opin. Plant Biol. 3: 461-468; Emanuelsson et al. (2000) J Mol. Biol. 300: 1005-1016; Emanuelsson & von Heijne (2001) Biochim Biophys Acta 1541: 114-119, each of which is herein incorporated by reference.

### V. Stacking Other Traits of Interest

[0081] In some embodiments, the polynucleotide encoding the GH3 polypeptide or an active variant or fragment thereof are engineered into a molecular stack. Thus, the various host cells, plants, plant cells and seeds disclosed herein can further comprise one or more traits of interest, and in more specific embodiments, the host cell, plant, plant part or plant cell is stacked with any combination of polynucleotide sequences of interest in order to create plants with a desired combination of traits. As used herein, the term “stacked” includes having the multiple traits present in the same plant (i.e., both traits are incorporated into the nuclear genome, one trait is incorporated into the nuclear genome and one trait is incorporated into the genome of a plastid, or both traits are incorporated into the genome of a plastid). In one non-limiting example, “stacked traits” comprise a molecular stack where the sequences are physically adjacent to each other. A trait, as used herein, refers to the phenotype derived from a particular sequence or groups of sequences. In one embodiment, the molecular stack comprises at least one additional polynucleotide that confers tolerance to at least one additional auxin-analog herbicide and/or at least one additional polynucleotide that confers tolerance to a second herbicide.

[0082] Thus, in one embodiment, the host cell, plants, plant cells or plant part having the polynucleotide encoding the GH3 polypeptide or an active variant or fragment thereof is stacked with at least one other GH3 sequence. Alternatively, the host cell, plant, plant cells or seed having the heterologous polynucleotide encoding the GH3 polypeptide can have the GH3 sequence stacked with an additional sequence that confers tolerance to an auxin-analog herbicide via a different mode of action than that of the GH3 sequence. Such sequences include, but are not limited to, the aryloxyalkanoate dioxygenase polynucleotides which confer tolerance to 2,4-D and other phenoxy auxin herbicides, as well as, to aryloxyphenoxypropionate herbicides as described, for example, in WO2005/107437. Additional sequence can further include dicamba-tolerance polynucleotides as described, for example, in Herman et al. (2005) J. Biol. Chem. 280: 24759-24767, U.S. Pat. Nos. 7,820,883; 8,088,979; 8,071,874; 8,119,380; 7,105,724; 7,855,3326; 8,084,666; 7,838,729; 5,670,454; US Application Publications 2012/0064539, 2012/0064540, 2011/0016591, 2007/0220629, 2001/0016890, 2003/0115626, WO2012/094555, WO2007/46706, WO2012/024853, EP0716808, and EP1379539, and an acetyl coenzyme A carboxylase (ACCase) polypeptides, each of which is herein incorporated by reference.

[0083] In still other embodiments, host cells, plants, plant cells, explants and expression cassettes comprising the polynucleotide encoding the GH3 polypeptide or active variant or fragment thereof are stacked with a sequence that confers tolerance to HPPD inhibitors. For example, a P450 sequence could be employed which provides tolerance to HPPD-inhibitors by metabolism of the herbicide. Such sequences include, but are not limited to, the NSF1 gene. See, US 2007/0214515 and US 2008/0052797, both of which are herein incorporated by reference in their entirety. Additional HPPD target site genes that confer herbicide tolerance to plants include those set forth in U.S. Pat. Nos. 6,245,968 B1; 6,268,549; and 6,069,115; international publication WO 99/23886, US App Pub. 2012-0042413 and US App Pub 2012-0042414, each of which is herein incorporated by reference.

[0084] In some embodiments, the host cell, plant or plant cell having the heterologous polynucleotide encoding a GH3 polypeptide or active variant or fragment thereof may be stacked with sequences that confer tolerance to glyphosate such as, for example, glyphosate N-acetyltransferase. See, for example, WO02/36782, US Publication 2004/0082770 and WO 2005/012515, U.S. Pat. No. 7,462,481, U.S. Pat. No. 7,405,074, each of which is herein incorporated by reference. Additional glyphosate-tolerance traits include a sequence that encodes a glyphosate oxido-reductase enzyme as described more fully in U.S. Pat. Nos. 5,776,760 and 5,463,175. Other traits that could be combined with the polynucleotide encoding the GH3 polypeptide or active variant or fragment thereof include those derived from polynucleotides that confer on the plant the capacity to produce a higher level or glyphosate insensitive 5-enolpyruvylshikimate-3-phosphate synthase (EPSPS), for example, as more fully described in U.S. Pat. Nos. 6,248,876 B1; 5,627,061; 5,804,425; 5,633,435; 5,145,783; 4,971,908; 5,312,910; 5,188,642; 4,940,835; 5,866,775; 6,225,114 B1; 6,130,366; 5,310,667; 4,535,060; 4,769,061; 5,633,448; 5,510,471; RE 36,449; RE 37,287 E; and 5,491,288; and international publications WO 97/04103; WO 00/66746; WO 01/66704; and WO 00/66747, 6,040,497; 5,094,945; 5,554,798; 6,040,497; Zhou et al. (1995) Plant Cell Rep.: 159-163; WO 0234946; WO 9204449; 6,225,112; 4,535,060, and 6,040,497, which are incorporated herein by reference in their entireties for all purposes. Additional EPSP synthase sequences include, gdc-1 (U.S. App. Publication 20040205847); EPSP synthases with class III domains (U.S. App. Publication 20060253921); gdc-1 (U.S. App. Publication 20060021093); gdc-2 (U.S. App. Publication 20060021094); gro-1 (U.S. App. Publication 20060150269); grg23 or grg 51 (U.S. App. Publication 20070136840); GRG32 (U.S. App. Publication 20070300325); GRG33, GRG35, GRG36, GRG37, GRG38, GRG39 and GRG50 (U.S. App. Publication 20070300326); or EPSP synthase sequences disclosed in, U.S. App. Publication 20040177399; 20050204436; 20060150270; 20070004907; 20070044175; 2007010707; 20070169218; 20070289035; and, 20070295251; each of which is herein incorporated by reference in their entirety.

[0085] In other embodiments, the host cell, plant or plant cell or plant part having the heterologous polynucleotide encoding the GH3 polypeptide or an active variant or fragment thereof is stacked with, for example, a sequence which confers tolerance to an ALS inhibitor. As used herein, an “ALS inhibitor-tolerant polypeptide” comprises any polypeptide which when expressed in a plant confers tolerance to at least one ALS inhibitor. Varieties of ALS inhibitors are known and include, for example, sulfonylurea, imidazolinone, triazolopyrimidines, pryimidinyoxy(thio)benzoates, and/or sulfonylaminocarbonyltriazolinone herbicides. Additional ALS inhibitors are known and are disclosed elsewhere herein. It is known in the art that ALS mutations fall into different classes with regard to tolerance to sulfonylureas, imidazolinones, triazolopyrimidines, and pyrimidinyl(thio)benzoates, including mutations having the following characteristics: (1) broad tolerance to all four of these groups; (2) tolerance to imidazolinones and pyrimidinyl(thio)benzoates; (3) tolerance to sulfonylureas and triazolopyrimidines; and (4) tolerance to sulfonylureas and imidazolinones.

[0086] Various ALS inhibitor-tolerant polypeptides can be employed. In some embodiments, the ALS inhibitor-tolerant polynucleotides contain at least one nucleotide mutation resulting in one amino acid change in the ALS polypeptide. In specific embodiments, the change occurs in one of seven substantially conserved regions of acetolactate synthase. See, for example, Hattori et al. (1995) Molecular Genetics and Genomes 246:419-425; Lee et al. (1998) EMBO Journal 7:1241-1248; Mazur et al. (1989) Ann. Rev. Plant Phys. 40:441-470; and U.S. Pat. No. 5,605,011, each of which is incorporated by reference in their entirety. The ALS inhibitor-tolerant polypeptide can be encoded by, for example, the SuRA or SuRB locus of ALS. In specific embodiments, the ALS inhibitor-tolerant polypeptide comprises the C3 ALS mutant, the HRA ALS mutant, the S4 mutant or the S4/HRA mutant or any combination thereof. Different mutations in ALS are known to confer tolerance to different herbicides and groups (and/or subgroups) of herbicides; see, e.g., Tranel and Wright (2002) Weed Science 50:700-712. See also, U.S. Pat. Nos. 5,605,011, 5,378,824, 5,141,870, and 5,013,659, each of which is herein incorporated by reference in their entirety. The soybean, maize, and Arabidopsis HRA sequences are disclosed, for example, in WO2007/024782, herein incorporated by reference.

[0087] In some embodiments, the ALS inhibitor-tolerant polypeptide confers tolerance to sulfonylurea and imidazolinone herbicides. The production of sulfonylurea-tolerant plants and imidazolinone-tolerant plants is described more fully in U.S. Pat. Nos. 5,605,011; 5,013,659; 5,141,870; 5,767,361; 5,731,180; 5,304,732; 4,761,373; 5,331,107; 5,928,937; and 5,378,824; and international publication WO 96/33270, which are incorporated herein by reference in their entireties for all purposes. In specific embodiments, the ALS inhibitor-tolerant polypeptide comprises a sulfonamide-tolerant acetolactate synthase (otherwise known as a sulfonamide-tolerant acetohydroxy acid synthase) or an imidazolinone-tolerant acetolactate synthase (otherwise known as an imidazolinone-tolerant acetohydroxy acid synthase).

[0088] In further embodiments, the host cell, plants or plant cell or plant part having the heterologous polynucleotide encoding the GH3 polypeptide or an active variant or fragment thereof is stacked with, for example, a sequence which confers tolerance to an ALS inhibitor and glyphosate tolerance. In one embodiment, the polynucleotide encoding the GH3 polypeptide or active variant or fragment thereof is stacked with HRA and a glyphosate N-acetyltransferase. See, WO2007/024782, 2008/0051288 and WO 2008/112019, each of which is herein incorporated by reference.

[0089] Other examples of herbicide-tolerance traits that could be combined with the host cell, plant or plant cell or plant part having the heterologous polynucleotide encoding the GH3 polypeptide or an active variant or fragment thereof include those conferred by polynucleotides encoding an exogenous phosphinothricin acetyltransferase, as described in U.S. Pat. Nos. 5,969,213; 5,489,520; 5,550,318; 5,874,265; 5,919,675; 5,561,236; 5,648,477; 5,646,024; 6,177,616; and 5,879,903. Plants containing an exogenous phosphinothricin acetyltransferase can exhibit improved tolerance to glufosinate herbicides, which inhibit the enzyme glutamine synthase. Other examples of herbicide-tolerance traits that could be combined with the plants or plant cell or plant part having the heterologous polynucleotide encoding the GH3 polypeptide or an active variant or fragment thereof include those conferred by polynucleotides conferring altered protoporphyrinogen oxidase (protox) activity, as described in U.S. Pat. Nos. 6,288,306 B1; 6,282,837 B1; and 5,767,373; and international publication WO 01/12825. Plants containing such polynucleotides can exhibit improved tolerance to any of a variety of herbicides which target the protox enzyme (also referred to as “protox inhibitors”).

[0090] Other examples of herbicide-tolerance traits that could be combined with the host cell, plant or plant cell or plant part having the heterologous polynucleotide encoding the GH3 polypeptide or an active variant or fragment thereof include those conferring tolerance to at least one herbicide in a plant such as, for example, a maize plant or horseweed. Herbicide-tolerant weeds are known in the art, as are plants that vary in their tolerance to particular herbicides. See, e.g., Green and Williams (2004) “Correlation of Corn (Zea mays) Inbred Response to Nicosulfuron and Mesotrione,” poster presented at the WSSA Annual Meeting in Kansas City, Mo., Feb. 9-12, 2004; Green (1998) Weed Technology 12: 474-477; Green and Ulrich (1993) Weed Science 41: 508-516. The trait(s) responsible for these tolerances can be combined by breeding or via other methods with the plants or plant cell or plant part having the heterologous polynucleotide encoding the GH3 or an active variant or fragment thereof to provide a plant of the invention, as well as, methods of use thereof.

[0091] In still further embodiments, the polynucleotide encoding the GH3 polypeptide can be stacked with at least one polynucleotide encoding a homogentisate solanesyltransferase (HST). See, for example, WO2010/023911 herein incorporated by reference in its entirety. In such embodiments, classes of herbicidal compounds—which act wholly or in part by inhibiting HST can be applied over the plants having the HTS polypeptide.

[0092] The host cell, plant or plant cell or plant part having the polynucleotide encoding the GH3 polypeptide or an active variant or fragment thereof can also be combined with at least one other trait to produce plants that further comprise a variety of desired trait combinations including, but not limited to, traits desirable for animal feed such as high oil content (e.g., U.S. Pat. No. 6,232,529); balanced amino acid content (e.g., hordothionins (U.S. Pat. Nos. 5,990,389; 5,885,801; 5,885,802; and 5,703,409; U.S. Pat. No. 5,850,016); barley high lysine (Williamson et al. (1987) Eur. J. Biochem. 165: 99-106; and WO 98/20122) and high methionine proteins (Pedersen et al. (1986) J. Biol. Chem. 261: 6279; Kirihara et al. (1988) Gene 71: 359; and Musumura et al. (1989) Plant Mol. Biol. 12:123)); increased digestibility (e.g., modified storage proteins (U.S. application Ser. No. 10/053,410, filed Nov. 7, 2001); and thioredoxins (U.S. application Ser. No. 10/005,429, filed Dec. 3, 2001)); the disclosures of which are herein incorporated by reference. Desired trait combinations also include LLNC (low linolenic acid content; see, e.g., Dyer et al. (2002) Appl. Microbiol. Biotechnol. 59: 224-230) and OLCH (high oleic acid content; see, e.g., Fernandez-Moya et al. (2005) J. Agric. Food Chem. 53: 5326-5330).

[0093] The host cell, plant or plant cell or plant part having the polynucleotide encoding the GH3 polypeptide or an active variant or fragment thereof can also be combined with other desirable traits such as, for example, fumonisim detoxification genes (U.S. Pat. No. 5,792,931), avirulence and disease resistance genes (Jones et al. (1994) Science 266: 789; Martin et al. (1993) Science 262: 1432; Mindrinos et al. (1994) Cell 78: 1089), and traits desirable for processing or process products such as modified oils (e.g., fatty acid desaturase genes (U.S. Pat. No. 5,952,544; WO 94/11516)); modified starches (e.g., ADPG pyrophosphorylases (AGPase), starch synthases (SS), starch branching enzymes (SBE), and starch debranching enzymes (SDBE)); and polymers or bioplastics (e.g., U.S. Pat. No. 5,602,321; beta-ketothiolase, polyhydroxybutyrate synthase, and acetoacetyl-CoA reductase (Schubert et al. (1988) J. Bacteriol. 170:5837-5847) facilitate expression of polyhydroxyalkanoates (PHAs)); the disclosures of which are herein incorporated by reference. One could also combine herbicide-tolerant polynucleotides with polynucleotides providing agronomic traits such as male sterility (e.g., see U.S. Pat. No. 5,583,210), stalk strength, flowering time, or transformation technology traits such as cell cycle regulation or gene targeting (e.g., WO 99/61619, WO 00/17364, and WO 99/25821); the disclosures of which are herein incorporated by reference.

[0094] In other embodiments, the host cell, plant or plant cell or plant part having the polynucleotide encoding the GH3 polypeptide or an active variant or fragment thereof may be stacked with any other polynucleotides encoding polypeptides having pesticidal and/or insecticidal activity, such as Bacillus thuringiensis toxic proteins (described in U.S. Pat. Nos. 5,366,892; 5,747,450; 5,737,514; 5,723,756; 5,593,881; Geiser et al. (1986) Gene 48: 109; Lee et al. (2003) Appl. Environ. Microbiol. 69: 4648-4657 (Vip3A); Galitzky et al. (2001) Acta Crystallogr. D. Biol. Crystallogr. 57: 1101-1109 (Cry3Bb1); and Herman et al. (2004) J. Agric. Food Chem. 52: 2726-2734 (CrylF)); lectins (Van Damme et al. (1994) Plant Mol. Biol. 24: 825, pentin (described in U.S. Pat. No. 5,981,722), and the like. The combinations generated can also include multiple copies of any one of the polynucleotides of interest.

[0095] In another embodiment, the host cell, plant or plant cell or plant part having the polynucleotide encoding the GH3 polypeptide or an active variant or fragment thereof can also be combined with the Rcg1 sequence or biologically active variant or fragment thereof. The Rcg1 sequence is an anthracnose stalk rot resistance gene in corn. See, for example, U.S. patent application Ser. Nos. 11/397,153, 11/397,275, and 11/397,247, each of which is herein incorporated by reference.

[0096] These stacked combinations can be created by any method including, but not limited to, breeding plants by any conventional methodology, or genetic transformation. If the sequences are stacked by genetically transforming the plants, the polynucleotide sequences of interest can be combined at any time and in any order. The traits can be introduced simultaneously in a co-transformation protocol with the polynucleotides of interest provided by any combination of transformation cassettes. For example, if two sequences will be introduced, the two sequences can be contained in separate transformation cassettes (trans) or contained on the same transformation cassette (cis). Expression of the sequences can be driven by the same promoter or by different promoters. In certain cases, it may be desirable to introduce a transformation cassette that will suppress the expression of the polynucleotide of interest. This may be combined with any combination of other suppression cassettes or overexpression cassettes to generate the desired combination of traits in the plant. It is further recognized that polynucleotide sequences can be stacked at a desired genomic location using a site-specific recombination system. See, for example, WO99/25821, WO99/25854, WO99/25840, WO99/25855, and WO99/25853, all of which are herein incorporated by reference. Additional systems can be used for site specific integration including, for example, various meganucleases systems as set forth in WO 2009/114321 (herein incorporated by reference), which describes “custom” meganucleases. See, also, Gao et al. (2010) Plant Journal 1:176-187. Additional site specific integration systems include, but are not limited, to Zn Fingers, meganucleases, and TAL nucleases. See, for example, WO2010/079430, WO2011/072246, and US20110201118, each of which is herein incorporated by reference in their entirety.

### VI. Method of Introducing

[0097] Various methods can be used to introduce a sequence of interest into a host cell, plant or plant part. “Introducing” is intended to mean presenting to the host cell, plant, plant cell or plant part the polynucleotide or polypeptide in such a manner that the sequence gains access to the interior of a cell. The methods disclosed herein do not depend on a particular method for introducing a sequence into a host cell, plant or plant part, only that the polynucleotide or polypeptides gains access to the interior of at least one cell. Methods for introducing polynucleotides or polypeptides into plants are known in the art including, but not limited to, stable transformation methods, transient transformation methods, and virus-mediated methods.

[0098] “Stable transformation” is intended to mean that the nucleotide construct introduced into a host cell or plant integrates into the genome of the host cell or plant and is capable of being inherited by the progeny thereof “Transient transformation” is intended to mean that a polynucleotide is introduced into the host cell or plant and does not integrate into the genome of the host cell or plant or a polypeptide is introduced into a host cell or plant.

[0099] Transformation protocols as well as protocols for introducing polypeptides or polynucleotide sequences into plants may vary depending on the type of plant or plant cell, i.e., monocot or dicot, targeted for transformation. Suitable methods of introducing polypeptides and polynucleotides into plant cells include microinjection (Crossway et al. (1986) Biotechniques 4:320-334), electroporation (Riggs et al. (1986) Proc. Natl. Acad. Sci. USA 83:5602-5606, Agrobacterium-mediated transformation (U.S. Pat. No. 5,563,055 and U.S. Pat. No. 5,981,840), direct gene transfer (Paszkowski et al. (1984) EMBO J. 3:2717-2722), and ballistic particle acceleration (see, for example, U.S. Pat. No. 4,945,050; U.S. Pat. No. 5,879,918; U.S. Pat. Nos. 5,886,244; and, 5,932,782; Tomes et al. (1995) in Plant Cell, Tissue, and Organ Culture: Fundamental Methods, ed. Gamborg and Phillips (Springer-Verlag, Berlin); McCabe et al. (1988) Biotechnology 6:923-926); and Lec1 transformation (WO 00/28058). Also see Weissinger et al. (1988) Ann. Rev. Genet. 22:421-477; Sanford et al. (1987) Particulate Science and Technology 5:27-37 (onion); Christou et al. (1988) Plant Physiol. 87:671-674 (soybean); McCabe et al. (1988) Bio/Technology 6:923-926 (soybean); Finer and McMullen (1991) In Vitro Cell Dev. Biol. 27P:175-182 (soybean); Singh et al. (1998) Theor. Appl. Genet. 96:319-324 (soybean); Datta et al. (1990) Biotechnology 8:736-740 (rice); Klein et al. (1988) Proc. Natl. Acad. Sci. USA 85:4305-4309 (maize); Klein et al. (1988) Biotechnology 6:559-563 (maize); U.S. Pat. Nos. 5,240,855; 5,322,783; and, 5,324,646; Klein et al. (1988) Plant Physiol. 91:440-444 (maize); Fromm et al. (1990) Biotechnology 8:833-839 (maize); Hooykaas-Van Slogteren et al. (1984) Nature (London) 311:763-764; U.S. Pat. No. 5,736,369 (cereals); Bytebier et al. (1987) Proc. Natl. Acad. Sci. USA 84:5345-5349 (Liliaceae); De Wet et al. (1985) in The Experimental Manipulation of Ovule Tissues, ed. Chapman et al. (Longman, N.Y.), pp. 197-209 (pollen); Kaeppler et al. (1990) Plant Cell Reports 9:415-418 and Kaeppler et al. (1992) Theor. Appl. Genet. 84:560-566 (whisker-mediated transformation); D'Halluin et al. (1992) Plant Cell 4:1495-1505 (electroporation); Li et al. (1993) Plant Cell Reports 12:250-255 and Christou and Ford (1995) Annals of Botany 75:407-413 (rice); Osjoda et al. (1996) Nature Biotechnology 14:745-750 (maize via Agrobacterium tumefaciens); all of which are herein incorporated by reference.

[0100] In specific embodiments, the GH3 sequences or active variant or fragments thereof can be provided to a plant using a variety of transient transformation methods. Such transient transformation methods include, but are not limited to, the introduction of the GH3 protein or active variants and fragments thereof directly into the plant. Such methods include, for example, microinjection or particle bombardment. See, for example, Crossway et al. (1986) Mol Gen. Genet. 202:179-185; Nomura et al. (1986) Plant Sci. 44:53-58; Hepler et al. (1994) Proc. Natl. Acad. Sci. 91: 2176-2180 and Hush et al. (1994) The Journal of Cell Science 107:775-784, all of which are herein incorporated by reference.

[0101] In other embodiments, the polynucleotide encoding the GH3 polypeptide or active variants or fragments thereof may be introduced into plants by contacting plants with a virus or viral nucleic acids. Generally, such methods involve incorporating a nucleotide construct of the invention within a DNA or RNA molecule. It is recognized that the an GH3 sequence may be initially synthesized as part of a viral polyprotein, which later may be processed by proteolysis in vivo or in vitro to produce the desired recombinant protein. Further, it is recognized that promoters of the invention also encompass promoters utilized for transcription by viral RNA polymerases. Methods for introducing polynucleotides into plants and expressing a protein encoded therein, involving viral DNA or RNA molecules, are known in the art. See, for example, U.S. Pat. Nos. 5,889,191, 5,889,190, 5,866,785, 5,589,367, 5,316,931, and Porta et al. (1996) Molecular Biotechnology 5:209-221; herein incorporated by reference.

[0102] Methods are known in the art for the targeted insertion of a polynucleotide at a specific location in the plant genome. In one embodiment, the insertion of the polynucleotide at a desired genomic location is achieved using a site-specific recombination system. See, for example, WO99/25821, WO99/25854, WO99/25840, WO99/25855, and WO99/25853, all of which are herein incorporated by reference. Briefly, the polynucleotide of the invention can be contained in transfer cassette flanked by two non-recombinogenic recombination sites. The transfer cassette is introduced into a plant having stably incorporated into its genome a target site which is flanked by two non-recombinogenic recombination sites that correspond to the sites of the transfer cassette. An appropriate recombinase is provided and the transfer cassette is integrated at the target site. The polynucleotide of interest is thereby integrated at a specific chromosomal position in the plant genome. Other methods to target polynucleotides are set forth in WO 2009/114321 (herein incorporated by reference), which describes “custom” meganucleases produced to modify plant genomes, in particular the genome of maize. See, also, Gao et al. (2010) Plant Journal 1:176-187.

[0103] The cells that have been transformed may be grown into plants in accordance with conventional ways. See, for example, McCormick et al. (1986) Plant Cell Reports 5:81-84. These plants may then be grown, and either pollinated with the same transformed strain or different strains, and the resulting progeny having constitutive expression of the desired phenotypic characteristic identified. Two or more generations may be grown to ensure that expression of the desired phenotypic characteristic is stably maintained and inherited and then seeds harvested to ensure expression of the desired phenotypic characteristic has been achieved. In this manner, the present invention provides transformed seed (also referred to as “transgenic seed”) having a polynucleotide of the invention, for example, an expression cassette of the invention, stably incorporated into their genome.

[0104] Additional host cells of interest include, for example, prokaryotes including various strains of E. coli and other microbial strains. Commonly used prokaryotic control sequences which are defined herein to include promoters for transcription initiation, optionally with an operator, along with ribosome binding sequences, include such commonly used promoters as the beta lactamase (penicillinase) and lactose (lac) promoter systems (Chang et al. (1977) Nature 198:1056), the tryptophan (trp) promoter system (Goeddel et al. (1980) Nucleic Acids Res. 8:4057) and the lambda derived P L promoter and N-gene ribosome binding site (Shimatake et al. (1981) Nature 292:128). The inclusion of selection markers in DNA vectors transfected in E coli. is also useful. Examples of such markers include genes specifying resistance to ampicillin, tetracycline, or chloramphenicol.

[0105] The vector is selected to allow introduction into the appropriate host cell. Bacterial vectors are typically of plasmid or phage origin. Appropriate bacterial cells are infected with phage vector particles or transfected with naked phage vector DNA. If a plasmid vector is used, the bacterial cells are transfected with the plasmid vector DNA. Expression systems for expressing a protein of the present invention are available using Bacillus sp. and Salmonella (Palva et al. (1983) Gene 22:229-235); Mosbach et al. (1983) Nature 302:543-545).

[0106] A variety of expression systems for yeast are known to those of skill in the art. Two widely utilized yeasts for production of eukaryotic proteins are Saccharomyces cerevisiae and Pichia pastoris. Vectors, strains, and protocols for expression in Saccharomyces and Pichia are known in the art and available from commercial suppliers. See, for Example, Sherman et al. (1982) Methods in Yeast Genetics, Cold Spring Harbor Laboratory.

### VII. Methods of Use

[0107] A. Methods to Detoxify an Auxin-Analog Herbicide

[0108] A method for detoxifying an auxin-analog herbicide is provided. Such methods employ increasing the level of a GH3 polypeptide or an active variant or fragment thereof in a plant, plant cell, plant part, explant, seed and applying to the plant, plant cell or plant part at least one auxin-analog herbicide. The GH3 polypeptide has amino acid/auxin-analog herbicide conjugation activity and can act to form an amino acid/auxin conjugate having reduced herbicide activity. In specific embodiments, the amino acid/auxin conjugated product having reduced herbicidal activity comprises an aspartate/auxin-analog conjugate, a glutamate/auxin-analog conjugate, an aspartate/dicamba conjugate, a glutamate/dicamba conjugate, an aspartate/2,4-D conjugate, and/or a glutamate/2,4-D conjugate.

[0109] In further embodiments, the concentration/level of the GH3 polypeptide is increased in a host cell, plant or plant part by at least 10%, 20%, 30%, 40%, 50%, 60%, 70%, 80%, 90%, 100%, 200%, 500%, 1000%, 5000%, or 10,000% relative to an appropriate control plant, plant part, or cell which did not have or did not express the heterologous GH3 sequence. In still other embodiments, the level of the GH3 polypeptide in the plant or plant part is increased by 10, 20, 30, 40, 50, 60, 70, 80, 90, 100 fold or more compared to the level of the native GH3 sequence. Such an increase in the level of the GH3 polypeptide can be achieved in a variety of ways including, for example, by the expression of multiple copies of one or more GH3 polypeptide and/or by employing a promoter to drive higher levels of expression of the sequence.

[0110] In specific embodiments, the polynucleotide encoding the GH3 polypeptide or active variant or fragment thereof is introduced into the host cell, plant, plant cell, explant or plant part. Subsequently, a host cell or plant cell having the introduced GH3 sequence is selected using methods known to those of skill in the art such as, but not limited to, Southern blot analysis, DNA sequencing, PCR analysis, or phenotypic analysis. A plant or plant part altered or modified by the foregoing embodiments is grown under plant forming conditions for a time sufficient to modulate the concentration and/or activity of polypeptides of the present invention in the plant. Plant forming conditions are well known in the art and discussed briefly elsewhere herein.

[0111] In one embodiment, a method of producing an auxin-analog herbicide tolerant plant cell is provided and comprises transforming a plant cell with the polynucleotide encoding a GH3 polypeptide or an active variant or fragment thereof. In specific embodiments, the method further comprises selecting a plant cell which shows an increased resistance or tolerance to an auxin-analog herbicide (such as, for example, dicamba or 2,4-D) by growing the plant cells in a sufficient concentration of the auxin-analog herbicide and selecting cells or plants which show an increased tolerance to the auxin-analog herbicide.

[0112] It is also recognized that the level and/or activity of the native GH3 sequence in a plant or plant cell may be altered by employing a polynucleotide that is not capable of directing, in a transformed plant, the expression of a protein or an RNA. For example, the polynucleotide encoding the GH3 polypeptide or active variant or fragment thereof may be used to design polynucleotide constructs that can be employed in methods for altering or mutating a genomic nucleotide sequence in an organism. Such polynucleotide constructs include, but are not limited to, RNA:DNA vectors, RNA:DNA mutational vectors, RNA:DNA repair vectors, mixed-duplex oligonucleotides, self-complementary RNA:DNA oligonucleotides, and recombinogenic oligonucleobases. Such nucleotide constructs and methods of use are known in the art. See, U.S. Pat. Nos. 5,565,350; 5,731,181; 5,756,325; 5,760,012; 5,795,972; and 5,871,984; all of which are herein incorporated by reference. See also, WO 98/49350, WO 99/07865, WO 99/25821, and Beetham et al. (1999) Proc. Natl. Acad. Sci. USA 96:8774-8778; herein incorporated by reference.

[0113] It is therefore recognized that methods of the present invention do not depend on the incorporation of the entire polynucleotide into the genome, only that the plant or cell thereof is altered as a result of the introduction of the polynucleotide into a cell. In one embodiment, the genome may be altered following the introduction of the polynucleotide into a cell. Alterations to the genome include, but are not limited to, additions, deletions, and substitutions of nucleotides into the genome. While the methods provided herein do not depend on additions, deletions, and substitutions of any particular number of nucleotides, it is recognized that such additions, deletions, or substitutions comprises at least one nucleotide.

[0114] In another embodiment, a method of producing an auxin-analog herbicide tolerant host cell (i.e., a microbial cell such as E. coli) is provided and comprises introducing into the host cell (i.e., the microbial cell, such as E. coli) a polynucleotide encoding a GH3 polypeptide or an active variant or fragment thereof. Microbial host cells expressing such GH3 sequences find use in bioremediation.

[0115] As used herein, “bioremediation” is the use of micro-organism metabolism to remove a contaminating material. In such embodiments, an effective amount of the microbial host expressing the GH3 polypeptide is contacted with a contaminated material (i.e., soil) having an auxin-analog herbicide (such as, for example, dicamba or 2,4-D). The microbial host detoxifies the auxin-analog herbicide and thereby reduces the level of the contaminant in the material (i.e., soil). Such methods can occur either in situ or ex situ. In situ bioremediation involves treating the contaminated material at the site, while ex situ involves the removal of the contaminated material to be treated elsewhere.

[0116] B. Method of Producing Crops and Controlling Weeds

[0117] Methods for controlling weeds in an area of cultivation, preventing the development or the appearance of herbicide resistant weeds in an area of cultivation, producing a crop, and increasing crop safety are provided. The term “controlling,” and derivations thereof, for example, as in “controlling weeds” refers to one or more of inhibiting the growth, germination, reproduction, and/or proliferation of; and/or killing, removing, destroying, or otherwise diminishing the occurrence and/or activity of a weed.

[0118] As used herein, an “area of cultivation” comprises any region in which one desires to grow a plant. Such areas of cultivations include, but are not limited to, a field in which a plant is cultivated (such as a crop field, a sod field, a tree field, a managed forest, a field for culturing fruits and vegetables, etc.), a greenhouse, a growth chamber, etc.

[0119] As used herein, by “selectively controlled” it is intended that the majority of weeds in an area of cultivation are significantly damaged or killed, while if crop plants are also present in the field, the majority of the crop plants are not significantly damaged. Thus, a method is considered to selectively control weeds when at least 55%, 60%, 65%, 70%, 75%, 80%, 85%, 90%, 95%, or more of the weeds are significantly damaged or killed, while if crop plants are also present in the field, less than 45%, 40%, 35%, 30%, 25%, 20%, 15%, 10%, 5%, or 1% of the crop plants are significantly damaged or killed.

[0120] Methods provided comprise planting the area of cultivation with a plant or a seed having a heterologous polynucleotide encoding a GH3 polypeptide or an active variant or fragment thereof, and in specific embodiments, applying to the crop, seed, weed and/or area of cultivation thereof an effective amount of a herbicide of interest. It is recognized that the herbicide can be applied before or after the crop is planted in the area of cultivation. Such herbicide applications can include an application of an auxin-analog herbicide including, but not limited to, an auxin-analog herbicides from one of the following families: phenoxy, carboxylic acid (or pyridine), benzoic acid, aminocyclopyrachlor, and quinaline carboxylic acid. In specific embodiments, the auxin-analog herbicide can comprise at least one of (2,4-dichlorophenoxy)acetic acid, 4-(2,4-dichlorophenoxy)butyric acid (2,4-DB), 2-(2,4-dichlorophenoxy)propanoic acid (2,4-DP), (2,4,5-trichlorophenoxy)acetic acid (2,4,5-T), 2-(2,4,5-Trichlorophenoxyl)Propionic Acid (2,4,5-TP), 2-(2,4-dichloro-3-methylphenoxy)-N-phenylpropanamide (clomeprop), (4-chloro-2-methylphenoxy)acetic acid (MCPA), 4-(4-chloro-o-tolyloxy)butyric acid (MCPB), 2-(4-chloro-2-methylphenoxy)propanoic acid (MCPP), 3,6-dichloro-2-pyridinecarboxylic acid (Clopyralid), 4-amino-3,5,6-trichloro-2-pyridinecarboxylic acid (picloram), (2,4,5-trichlorophenoxy) acetic acid (triclopyr), 4-amino-3,5-dichloro-6-fluoro-2-pyridyloxyacetic acid (fluoroxypyr), 3,6-dichloro-o-anisic acid (dicamba) and 3-amino-2,5-dichlorobenzoic acid (choramben), 3,7-dichloro-8-quinolinecarboxylic acid (quinclorac) and 7-chloro-3-methyl-8-quinolinecarboxylic acid (quinmerac). In specific embodiments, the auxin-analog herbicide comprises dicamba or 2,4-D. Generally, the effective amount of herbicide applied to the field is sufficient to selectively control the weeds without significantly affecting the crop.

[0121] “Weed” as used herein refers to a plant which is not desirable in a particular area. Conversely, a “crop plant” as used herein refers to a plant which is desired in a particular area, such as, for example, a maize or soybean plant. Thus, in some embodiments, a weed is a non-crop plant or a non-crop species, while in some embodiments, a weed is a crop species which is sought to be eliminated from a particular area, such as, for example, an inferior and/or non-transgenic soybean plant in a field planted with a plant having the heterologous nucleotide sequence encoding the GH3 polypeptide or an active variant or fragment thereof

[0122] Further provided is a method for producing a crop by growing a crop plant that is tolerant to an auxin-analog herbicide as a result of being transformed with a heterologous polynucleotide encoding a GH3 polypeptide or an active variant or fragment thereof, under conditions such that the crop plant produces a crop, and harvesting the crop. Preferably, an auxin-analog herbicide is applied to the plant, or in the vicinity of the plant, or in the area of cultivation at a concentration effective to control weeds without preventing the transgenic crop plant from growing and producing the crop. The application of the auxin-analog herbicide can be before planting, or at any time after planting up to and including the time of harvest. The auxin-analog herbicide can be applied once or multiple times. The timing of the auxin-analog herbicide application, amount applied, mode of application, and other parameters will vary based upon the specific nature of the crop plant and the growing environment. The invention further provides the crop produced by this method.

[0123] Further provided are methods for the propagation of a plant containing a heterologous polynucleotide encoding a GH3 polypeptide or active variant or fragment thereof. The plant can be, for example, a monocot or a dicot. In one aspect, propagation entails crossing a plant containing the heterologous polynucleotide encoding a GH3 polypeptide transgene with a second plant, such that at least some progeny of the cross display auxin-analog herbicide tolerance.

[0124] The methods of the invention further allow for the development of herbicide applications to be used with the plants having the heterologous polynucleotides encoding the GH3 polypeptides or active variants or fragments thereof. In such methods, the environmental conditions in an area of cultivation are evaluated. Environmental conditions that can be evaluated include, but are not limited to, ground and surface water pollution concerns, intended use of the crop, crop tolerance, soil residuals, weeds present in area of cultivation, soil texture, pH of soil, amount of organic matter in soil, application equipment, and tillage practices. Upon the evaluation of the environmental conditions, an effective amount of a combination of herbicides can be applied to the crop, crop part, seed of the crop or area of cultivation.

[0125] Any herbicide or combination of herbicides can be applied to the plant having the heterologous polynucleotide encoding the GH3 polypeptide or active variant or fragment thereof disclosed herein or transgenic seed derived there from, crop part, or the area of cultivation containing the crop plant. By “treated with a combination of” or “applying a combination of” herbicides to a crop, area of cultivation or field it is intended that a particular field, crop or weed is treated with each of the herbicides and/or chemicals indicated to be part of the combination so that a desired effect is achieved, i.e., so that weeds are selectively controlled while the crop is not significantly damaged. The application of each herbicide and/or chemical may be simultaneous or the applications may be at different times (sequential), so long as the desired effect is achieved. Furthermore, the application can occur prior to the planting of the crop.

[0126] Classifications of herbicides (i.e., the grouping of herbicides into classes and subclasses) are well-known in the art and include classifications by HRAC (Herbicide Resistance Action Committee) and WSSA (the Weed Science Society of America) (see also, Retzinger and Mallory-Smith (1997) Weed Technology 11: 384-393). An abbreviated version of the HRAC classification (with notes regarding the corresponding WSSA group) is set forth below in Table 1.

[0127] Herbicides can be classified by their mode of action and/or site of action and can also be classified by the time at which they are applied (e.g., preemergent or postemergent), by the method of application (e.g., foliar application or soil application), or by how they are taken up by or affect the plant or by their structure. “Mode of action” generally refers to the metabolic or physiological process within the plant that the herbicide inhibits or otherwise impairs, whereas “site of action” generally refers to the physical location or biochemical site within the plant where the herbicide acts or directly interacts. Herbicides can be classified in various ways, including by mode of action and/or site of action (see, e.g., Table 1).

[0128] In specific embodiments, the plants of the present invention can tolerate treatment with different types of herbicides (i.e., herbicides having different modes of action and/or different sites of action) thereby permitting improved weed management strategies that are recommended in order to reduce the incidence and prevalence of herbicide-tolerant weeds.

TABLE 1
Abbreviated version of HRAC Herbicide Classification.

I. ALS Inhibitors (WSSA Group 2)

A. Sulfonylureas

```
  1. Azimsulfuron
  2. Chlorimuron-ethyl
  3. Metsulfuron-methyl
  4. Nicosulfuron
  5. Rimsulfuron
  6. Sulfometuron-methyl
  7. Thifensulfuron-methyl
  8. Tribenuron-methyl
  9. Amidosulfuron
10. Bensulfuron-methyl
11. Chlorsulfuron
12. Cinosulfuron
13. Cyclosulfamuron
14. Ethametsulfuron-methyl
15. Ethoxysulfuron
16. Flazasulfuron
17. Flupyrsulfuron-methyl
18. Foramsulfuron
19. Imazosulfuron
20. Iodosulfuron-methyl
21. Mesosulfuron-methyl
22. Oxasulfuron
23. Primisulfuron-methyl
24. Prosulfuron
25. Pyrazosulfuron-ethyl
26. Sulfosulfuron
27. Triasulfuron
28. Trifloxysulfuron
29. Triflusulfuron-methyl
30. Tritosulfuron
31. Halosulfuron-methyl
32. Flucetosulfuron
```

B. Sulfonylaminocarbonyltriazolinones

1. Flucarbazone
2. Procarbazone

C. Triazolopyrimidines

1. Cloransulam-methyl
2. Flumetsulam
3. Diclosulam
4. Florasulam
5. Metosulam
6. Penoxsulam
7. Pyroxsulam

D. Pyrimidinyloxy(thio)benzoates

1. Bispyribac
2. Pyriftalid
3. Pyribenzoxim
4. Pyrithiobac
5. Pyriminobac-methyl

E. Imidazolinones

1. Imazapyr
2. Imazethapyr
3. Imazaquin
4. Imazapic
5. Imazamethabenz-methyl
6. Imazamox

II. Other Herbicides--Active Ingredients/
Additional Modes of Action

A. Inhibitors of Acetyl CoA carboxylase

(ACCase) (WSSA Group 1)

1. Aryloxyphenoxypropionates (‘FOPs’)

a. Quizalofop-P-ethyl
b. Diclofop-methyl
c. Clodinafop-propargyl
d. Fenoxaprop-P-ethyl
e. Fluazifop-P-butyl
f. Propaquizafop
g. Haloxyfop-P-methyl
h. Cyhalofop-butyl
i. Quizalofop-P-ethyl

2. Cyclohexanediones (‘DIMs’)

a. Alloxydim
b. Butroxydim
c. Clethodim
d. Cycloxydim
e. Sethoxydim
f. Tepraloxydim
g. Tralkoxydim

B. Inhibitors of Photosystem II-HRAC

Group C1/WSSA Group 5

1. Triazines

a. Ametryne
b. Atrazine
c. Cyanazine
d. Desmetryne
e. Dimethametryne
f. Prometon
g. Prometryne
h. Propazine
i. Simazine
j. Simetryne
k. Terbumeton
l. Terbuthylazine
m. Terbutryne
n. Trietazine

2. Triazinones

a. Hexazinone
b. Metribuzin
c. Metamitron

3. Triazolinone

a. Amicarbazone

4. Uracils

a. Bromacil
b. Lenacil
c. Terbacil

5. Pyridazinones

a. Pyrazon

6. Phenyl carbamates

a. Desmedipham
b. Phenmedipham

C. Inhibitors of Photosystem II--HRAC

Group C2/WSSA Group 7

1. Ureas

a. Fluometuron
b. Linuron
c. Chlorobromuron
d. Chlorotoluron
e. Chloroxuron
f. Dimefuron
g. Diuron
h. Ethidimuron
i. Fenuron
j. Isoproturon
k. Isouron
l. Methabenzthiazuron
m. Metobromuron
n. Metoxuron
o. Monolinuron
p. Neburon
q. Siduron
r. Tebuthiuron

2. Amides

a. Propanil
b. Pentanochlor

D. Inhibitors of Photosystem II--HRAC

Group C3/WSSA Group 6

1. Nitriles

a. Bromofenoxim
b. Bromoxynil
c. Ioxynil

2. Benzothiadiazinone (Bentazon)

a. Bentazon

3. Phenylpyridazines

a. Pyridate
b. Pyridafol

E. Photosystem-I-electron diversion

(Bipyridyliums) (WSSA Group 22)

1. Diquat
2. Paraquat

F. Inhibitors of PPO (protoporphyrinogen

oxidase) (WSSA Group 14)

1. Diphenylethers

a. Acifluorfen-Na
b. Bifenox
c. Chlomethoxyfen
d. Fluoroglycofen-ethyl
e. Fomesafen
f. Halosafen
g. Lactofen
h. Oxyfluorfen

2. Phenylpyrazoles

a. Fluazolate
b. Pyraflufen-ethyl

3. N-phenylphthalimides

a. Cinidon-ethyl
b. Flumioxazin
c. Flumiclorac-pentyl

4. Thiadiazoles

a. Fluthiacet-methyl
b. Thidiazimin

5. Oxadiazoles

a. Oxadiazon
b. Oxadiargyl

6. Triazolinones

a. Carfentrazone-ethyl
b. Sulfentrazone

7. Oxazolidinediones

a. Pentoxazone

8. Pyrimidindiones

a. Benzfendizone
b. Butafenicil

9. Others

a. Pyrazogyl
b. Profluazol

G. Bleaching: Inhibition of carotenoid

biosynthesis at the phytoene desaturase step
(PDS) (WSSA Group 12)

1. Pyridazinones

a. Norflurazon

2. Pyridinecarboxamides

a. Diflufenican
b. Picolinafen

3. Others

a. Beflubutamid
b. Fluridone
c. Flurochloridone
d. Flurtamone

H. Bleaching: Inhibition of 4-

hydroxyphenyl-pyruvate-dioxygenase (4-HPPD)
(WSSA Group 28)

1. Triketones

a. Mesotrione
b. Sulcotrione
c. topramezone
d. tembotrione

2. Isoxazoles

a. Pyrasulfotole
b. Isoxaflutole

3. Pyrazoles

a. Benzofenap
b. Pyrazoxyfen
c. Pyrazolynate

4. Others

a. Benzobicyclon

I. Bleaching: Inhibition of carotenoid

biosynthesis (unknown target) (WSSA Group 11
and 13)

1. Triazoles (WSSA Group 11)

a. Amitrole

2. Isoxazolidinones (WSSA Group 13)

a. Clomazone

3. Ureas

a. Fluometuron

3. Diphenylether

a. Aclonifen

J. Inhibition of EPSP Synthase

1. Glycines (WSSA Group 9)

a. Glyphosate
b. Sulfosate

K. Inhibition of glutamine synthetase

1. Phosphinic Acids

a. Glufosinate-ammonium
b. Bialaphos

L. Inhibition of DHP (dihydropteroate)

synthase (WSSA Group 18)

1 Carbamates

a. Asulam

M. Microtubule Assembly Inhibition

(WSSA Group 3)

1. Dinitroanilines

a. Benfluralin
b. Butralin
c. Dinitramine
d. Ethalfluralin
e. Oryzalin
f. Pendimethalin
g. Trifluralin

2. Phosphoroamidates

a. Amiprophos-methyl
b. Butamiphos

3. Pyridines

a. Dithiopyr
b. Thiazopyr

4. Benzamides

a. Pronamide
b. Tebutam

5. Benzenedicarboxylic acids

a. Chlorthal-dimethyl

N. Inhibition of mitosis/microtubule

organization WSSA Group 23)

1. Carbamates

a. Chlorpropham
b. Propham
c. Carbetamide

O. Inhibition of cell division (Inhibition of

very long chain fatty acids as proposed
mechanism; WSSA Group 15)

1. Chloroacetamides

a. Acetochlor
b. Alachlor
c. Butachlor
d. Dimethachlor
e. Dimethanamid
f. Metazachlor
g. Metolachlor
h. Pethoxamid
i. Pretilachlor
j. Propachlor
k. Propisochlor
l. Thenylchlor

2. Acetamides

a. Diphenamid
b. Napropamide
c. Naproanilide

3. Oxyacetamides

a. Flufenacet
b. Mefenacet

4. Tetrazolinones

a. Fentrazamide

5. Others

a. Anilofos
b. Cafenstrole
c. Indanofan
d. Piperophos

P. Inhibition of cell wall (cellulose)

synthesis

1. Nitriles (WSSA Group 20)

a. Dichlobenil
b. Chlorthiamid

2. Benzamides (isoxaben (WSSA

Group 21))

a. Isoxaben

3. Triazolocarboxamides (flupoxam)

a. Flupoxam

Q. Uncoupling (membrane disruption):

(WSSA Group 24)

1. Dinitrophenols

a. DNOC
b. Dinoseb
c. Dinoterb

R. Inhibition of Lipid Synthesis by other

than ACC inhibition

1. Thiocarbamates (WSSA Group 8)

a. Butylate
b. Cycloate
c. Dimepiperate
d. EPTC
e. Esprocarb
f. Molinate
g. Orbencarb
h. Pebulate
i. Prosulfocarb
j. Benthiocarb
k. Tiocarbazil
l. Triallate
m. Vernolate

2. Phosphorodithioates

a. Bensulide

3. Benzofurans

a. Benfuresate
b. Ethofumesate

4. Halogenated alkanoic acids

(WSSA Group 26)

a. TCA
b. Dalapon
c. Flupropanate

S. Synthetic auxins (IAA-like) (WSSA

Group 4)

1. Phenoxycarboxylic acids

a. Clomeprop
b. 2,4-D
c. Mecoprop

2. Benzoic acids

a. Dicamba
b. Chloramben
c. TBA

3. Pyridine carboxylic acids

a. Clopyralid
b. Fluroxypyr
c. Picloram
d. Tricyclopyr

4. Quinoline carboxylic acids

a. Quinclorac
b. Quinmerac

5. Others (benazolin-ethyl)

a. Benazolin-ethyl

6. aminocyclopyrachlor

T. Inhibition of Auxin Transport

1. Phthalamates; semicarbazones

(WSSA Group 19)

a. Naptalam
b. Diflufenzopyr-Na

U. Other Mechanism of Action

1. Arylaminopropionic acids

a. Flamprop-M-methyl/-

isopropyl

2. Pyrazolium

a. Difenzoquat

3. Organoarsenicals

a. DSMA
b. MSMA

4. Others

a. Bromobutide
b. Cinmethylin
c. Cumyluron
d. Dazomet
e. Daimuron-methyl
f. Dimuron
g. Etobenzanid
h. Fosamine
i. Metam
j. Oxaziclomefone
k. Oleic acid
l. Pelargonic acid
m. Pyributicarb

[0129] In still further methods, an auxin-analog herbicide can be applied alone or in combination with another herbicide of interest and can be applied to the plants having the heterologous polynucleotide encoding the GH3 polypeptide or active variant or fragment thereof or their area of cultivation.

[0130] Additional herbicide treatment that can be applied over the plants or seeds having the heterologous polynucleotide encoding the GH3 polypeptide or an active variant or fragment thereof include, but are not limited to: acetochlor, acifluorfen and its sodium salt, aclonifen, acrolein (2-propenal), alachlor, alloxydim, ametryn, amicarbazone, amidosulfuron, aminopyralid, aminocyclopyrachlor, amitrole, ammonium sulfamate, anilofos, asulam, atrazine, azimsulfuron, beflubutamid, benazolin, benazolin-ethyl, bencarbazone, benfluralin, benfuresate, bensulfuron-methyl, bensulide, bentazone, benzobicyclon, benzofenap, bifenox, bilanafos, bispyribac and its sodium salt, bromacil, bromobutide, bromofenoxim, bromoxynil, bromoxynil octanoate, butachlor, butafenacil, butamifos, butralin, butroxydim, butylate, cafenstrole, carbetamide, carfentrazone-ethyl, catechin, chlomethoxyfen, chloramben, chlorbromuron, chlorflurenol-methyl, chloridazon, chlorimuron-ethyl, chlorotoluron, chlorpropham, chlorsulfuron, chlorthal-dimethyl, chlorthiamid, cinidon-ethyl, cinmethylin, cinosulfuron, clethodim, clodinafop-propargyl, clomazone, clomeprop, clopyralid, clopyralid-olamine, cloransulam-methyl, CUH-35 (2-methoxyethyl 2-[[[4-chloro-2-fluoro-5-[(1-methyl-2-propynyl)oxy]phenyl](3-fluorobenzoyl)amino]carbonyl]-1-cyclohexene-1-carboxylate), cumyluron, cyanazine, cycloate, cyclosulfamuron, cycloxydim, cyhalofop-butyl, 2,4-D and its butotyl, butyl, isoctyl and isopropyl esters and its dimethylammonium, diolamine and trolamine salts, daimuron, dalapon, dalapon-sodium, dazomet, 2,4-DB and its dimethylammonium, potassium and sodium salts, desmedipham, desmetryn, dicamba and its diglycolammonium, dimethylammonium, potassium and sodium salts, dichlobenil, dichlorprop, diclofop-methyl, diclosulam, difenzoquat metilsulfate, diflufenican, diflufenzopyr, dimefuron, dimepiperate, dimethachlor, dimethametryn, dimethenamid, dimethenamid-P, dimethipin, dimethylarsinic acid and its sodium salt, dinitramine, dinoterb, diphenamid, diquat dibromide, dithiopyr, diuron, DNOC, endothal, EPTC, esprocarb, ethalfluralin, ethametsulfuron-methyl, ethofumesate, ethoxyfen, ethoxysulfuron, etobenzanid, fenoxaprop-ethyl, fenoxaprop-P-ethyl, fentrazamide, fenuron, fenuron-TCA, flamprop-methyl, flamprop-M-isopropyl, flamprop-M-methyl, flazasulfuron, florasulam, fluazifop-butyl, fluazifop-P-butyl, flucarbazone, flucetosulfuron, fluchloralin, flufenacet, flufenpyr, flufenpyr-ethyl, flumetsulam, flumiclorac-pentyl, flumioxazin, fluometuron, fluoroglycofen-ethyl, flupyrsulfuron-methyl and its sodium salt, flurenol, flurenol-butyl, fluridone, flurochloridone, fluroxypyr, flurtamone, fluthiacet-methyl, fomesafen, foramsulfuron, fosamine-ammonium, glufosinate, glufosinate-ammonium, glyphosate and its salts such as ammonium, isopropylammonium, potassium, sodium (including sesquisodium) and trimesium (alternatively named sulfosate) (See, WO2007/024782, herein incorporated by reference), halosulfuron-methyl, haloxyfop-etotyl, haloxyfop-methyl, hexazinone, HOK-201 (N-(2,4-difluorophenyl)-1,5-dihydro-N-(1-methylethyl)-5-oxo-1-[(tetrahydro-2H-pyran-2-yl)methyl]-4H-1,2,4-triazole-4-carboxamide), imazamethabenz-methyl, imazamox, imazapic, imazapyr, imazaquin, imazaquin-ammonium, imazethapyr, imazethapyr-ammonium, imazosulfuron, indanofan, iodosulfuron-methyl, ioxynil, ioxynil octanoate, ioxynil-sodium, isoproturon, isouron, isoxaben, isoxaflutole, pyrasulfotole, lactofen, lenacil, linuron, maleic hydrazide, MCPA and its salts (e.g., MCPA-dimethylammonium, MCPA-potassium and MCPA-sodium, esters (e.g., MCPA-2-ethylhexyl, MCPA-butotyl) and thioesters (e.g., MCPA-thioethyl), MCPB and its salts (e.g., MCPB-sodium) and esters (e.g., MCPB-ethyl), mecoprop, mecoprop-P, mefenacet, mefluidide, mesosulfuron-methyl, mesotrione, metam-sodium, metamifop, metamitron, metazachlor, methabenzthiazuron, methylarsonic acid and its calcium, monoammonium, monosodium and disodium salts, methyldymron, metobenzuron, metobromuron, metolachlor, S-metholachlor, metosulam, metoxuron, metribuzin, metsulfuron-methyl, molinate, monolinuron, naproanilide, napropamide, naptalam, neburon, nicosulfuron, norflurazon, orbencarb, oryzalin, oxadiargyl, oxadiazon, oxasulfuron, oxaziclomefone, oxyfluorfen, paraquat dichloride, pebulate, pelargonic acid, pendimethalin, penoxsulam, pentanochlor, pentoxazone, perfluidone, pethoxyamid, phenmedipham, picloram, picloram-potassium, picolinafen, pinoxaden, piperofos, pretilachlor, primisulfuron-methyl, prodiamine, profoxydim, prometon, prometryn, propachlor, propanil, propaquizafop, propazine, propham, propisochlor, propoxycarbazone, propyzamide, prosulfocarb, prosulfuron, pyraclonil, pyraflufen-ethyl, pyrasulfotole, pyrazogyl, pyrazolynate, pyrazoxyfen, pyrazosulfuron-ethyl, pyribenzoxim, pyributicarb, pyridate, pyriftalid, pyriminobac-methyl, pyrimisulfan, pyrithiobac, pyrithiobac-sodium, pyroxsulam, quinclorac, quinmerac, quinoclamine, quizalofop-ethyl, quizalofop-P-ethyl, quizalofop-P-tefuryl, rimsulfuron, sethoxydim, siduron, simazine, simetryn, sulcotrione, sulfentrazone, sulfometuron-methyl, sulfosulfuron, 2,3,6-TBA, TCA, TCA-sodium, tebutam, tebuthiuron, tefuryltrione, tembotrione, tepraloxydim, terbacil, terbumeton, terbuthylazine, terbutryn, thenylchlor, thiazopyr, thiencarbazone, thifensulfuron-methyl, thiobencarb, tiocarbazil, topramezone, tralkoxydim, tri-allate, triasulfuron, triaziflam, tribenuron-methyl, triclopyr, triclopyr-butotyl, triclopyr-triethylammonium, tridiphane, trietazine, trifloxysulfuron, trifluralin, triflusulfuron-methyl, tritosulfuron and vernolate.

[0131] Additional herbicides include those that are applied over plants having homogentisate solanesyltransferase (HST) polypeptide such as those described in WO2010029311(A2), herein incorporate by reference it its entirety.

[0132] Other suitable herbicides and agricultural chemicals are known in the art, such as, for example, those described in WO 2005/041654. Other herbicides also include bioherbicides such as Alternaria destruens Simmons, Colletotrichum gloeosporiodes (Penz.) Penz. & Sacc., Drechsiera monoceras (MTB-951), Myrothecium verrucaria (Albertini & Schweinitz) Ditmar: Fries, Phytophthora palmivora (Butl.) Butl. and Puccinia thlaspeos Schub. Combinations of various herbicides can result in a greater-than-additive (i.e., synergistic) effect on weeds and/or a less-than-additive effect (i.e. safening) on crops or other desirable plants. In certain instances, combinations of auxin-analog herbicides with other herbicides having a similar spectrum of control but a different mode of action will be particularly advantageous for preventing the development of resistant weeds.

[0133] The time at which a herbicide is applied to an area of interest (and any plants therein) may be important in optimizing weed control. The time at which a herbicide is applied may be determined with reference to the size of plants and/or the stage of growth and/or development of plants in the area of interest, e.g., crop plants or weeds growing in the area.

[0134] Ranges of the effective amounts of herbicides can be found, for example, in various publications from University Extension services. See, for example, Bernards et al. (2006) Guide for Weed Management in Nebraska (www.ianrpubs.url.edu/sendlt/ec130); Regher et al. (2005) Chemical Weed Control for Fields Crops, Pastures, Rangeland, and Noncropland, Kansas State University Agricultural Extension Station and Corporate Extension Service; Zollinger et al. (2006) North Dakota Weed Control Guide, North Dakota Extension Service, and the Iowa State University Extension at www.weeds.iastate.edu, each of which is herein incorporated by reference.

[0135] Many plant species can be controlled (i.e., killed or damaged) by the herbicides described herein. Accordingly, the methods of the invention are useful in controlling these plant species where they are undesirable (i.e., where they are weeds). These plant species include crop plants as well as species commonly considered weeds, including but not limited to species such as: blackgrass (Alopecurus myosuroides), giant foxtail (Setaria faberi), large crabgrass (Digitaria sanguinalis), Surinam grass (Brachiaria decumbens), wild oat (Avena fatua), common cocklebur (Xanthium pensylvanicum), common lambsquarters (Chenopodium album), morning glory (Ipomoea coccinea), pigweed (Amaranthus spp.), common waterhemp (Amaranthus tuberculatus), velvetleaf (Abutilion theophrasti), common barnyardgrass (Echinochloa crus-galli), bermudagrass (Cynodon dactylon), downy brome (Bromus tectorum), goosegrass (Eleusine indica), green foxtail (Setaria viridis), Italian ryegrass (Lolium multiflorum), Johnsongrass (Sorghum halepense), lesser canarygrass (Phalaris minor), windgrass (Apera spica-venti), wooly cupgrass (Erichloa villosa), yellow nutsedge (Cyperus esculentus), common chickweed (Stellaria media), common ragweed (Ambrosia artemisiifolia), Kochia scoparia, horseweed (Conyza canadensis), rigid ryegrass (Lolium rigidum), goosegrass (Eleucine indica), hairy fleabane (Conyza bonariensis), buckhorn plantain (Plantago lanceolata), tropical spiderwort (Commelina benghalensis), field bindweed (Convolvulus arvensis), purple nutsedge (Cyperus rotundus), redvine (Brunnichia ovata), hemp sesbania (Sesbania exaltata), sicklepod (Senna obtusifolia), Texas blueweed (Helianthus ciliaris), and Devil's claws (Proboscidea louisianica). In other embodiments, the weed comprises a herbicide-resistant ryegrass, for example, a glyphosate resistant ryegrass, a paraquat resistant ryegrass, a ACCase-inhibitor resistant ryegrass, and a non-selective herbicide resistant ryegrass.

[0136] In some embodiments, a plant having the heterologous polynucleotide encoding the GH3 polypeptide or an active variant or fragment thereof is not significantly damaged by treatment with an auxin-analog herbicide applied to that plant, whereas an appropriate control plant is significantly damaged by the same treatment.

[0137] Generally, an auxin-analog herbicide is applied to a particular field (and any plants growing in it) no more than 1, 2, 3, 4, 5, 6, 7, or 8 times a year, or no more than 1, 2, 3, 4, or 5 times per growing season. Thus, methods of the invention encompass applications of herbicide which are “preemergent,” “postemergent,” “preplant incorporation” and/or which involve seed treatment prior to planting.

[0138] In one embodiment, methods are provided for coating seeds. The methods comprise coating a seed with an effective amount of a herbicide or a combination of herbicides (as disclosed elsewhere herein). The seeds can then be planted in an area of cultivation. Further provided are seeds having a coating comprising an effective amount of a herbicide or a combination of herbicides (as disclosed elsewhere herein). In other embodiments, the seeds can be coated with at least one fungicide and/or at least one insecticide and/or at least one herbicide or any combination thereof.

[0139] “Preemergent” refers to a herbicide which is applied to an area of interest (e.g., a field or area of cultivation) before a plant emerges visibly from the soil. “Postemergent” refers to a herbicide which is applied to an area after a plant emerges visibly from the soil. In some instances, the terms “preemergent” and “postemergent” are used with reference to a weed in an area of interest, and in some instances these terms are used with reference to a crop plant in an area of interest. When used with reference to a weed, these terms may apply to only a particular type of weed or species of weed that is present or believed to be present in the area of interest. While any herbicide may be applied in a preemergent and/or postemergent treatment, some herbicides are known to be more effective in controlling a weed or weeds when applied either preemergence or postemergence. For example, rimsulfuron has both preemergence and postemergence activity, while other herbicides have predominately preemergence (metolachlor) or postemergence (glyphosate) activity. These properties of particular herbicides are known in the art and are readily determined by one of skill in the art. Further, one of skill in the art would readily be able to select appropriate herbicides and application times for use with the transgenic plants of the invention and/or on areas in which transgenic plants of the invention are to be planted. “Preplant incorporation” involves the incorporation of compounds into the soil prior to planting.

[0140] Thus, improved methods of growing a crop and/or controlling weeds such as, for example, “pre-planting burn down,” are provided wherein an area is treated with herbicides prior to planting the crop of interest in order to better control weeds. The invention also provides methods of growing a crop and/or controlling weeds which are “no-till” or “low-till” (also referred to as “reduced tillage”). In such methods, the soil is not cultivated or is cultivated less frequently during the growing cycle in comparison to traditional methods; these methods can save costs that would otherwise be incurred due to additional cultivation, including labor and fuel costs.

[0141] The term “safener” refers to a substance that when added to a herbicide formulation eliminates or reduces the phytotoxic effects of the herbicide to certain crops. One of ordinary skill in the art would appreciate that the choice of safener depends, in part, on the crop plant of interest and the particular herbicide or combination of herbicides. Exemplary safeners suitable for use with the presently disclosed herbicide compositions include, but are not limited to, those disclosed in U.S. Pat. Nos. 4,808,208; 5,502,025; 6,124,240 and U.S. Patent Application Publication Nos. 2006/0148647; 2006/0030485; 2005/0233904; 2005/0049145; 2004/0224849; 2004/0224848; 2004/0224844; 2004/0157737; 2004/0018940; 2003/0171220; 2003/0130120; 2003/0078167, the disclosures of which are incorporated herein by reference in their entirety. The methods of the invention can involve the use of herbicides in combination with herbicide safeners such as benoxacor, BCS (1-bromo-4-[(chloromethyl) sulfonyl]benzene), cloquintocet-mexyl, cyometrinil, dichlormid, 2-(dichloromethyl)-2-methyl-1,3-dioxolane (MG 191), fenchlorazole-ethyl, fenclorim, flurazole, fluxofenim, furilazole, isoxadifen-ethyl, mefenpyr-diethyl, methoxyphenone ((4-methoxy-3-methylphenyl)(3-methylphenyl)-methanone), naphthalic anhydride (1,8-naphthalic anhydride) and oxabetrinil to increase crop safety. Antidotally effective amounts of the herbicide safeners can be applied at the same time as the compounds of this invention, or applied as seed treatments. Therefore an aspect of methods disclosed herein relates to the use of a mixture comprising an auxin-analog herbicide, at least one other herbicide, and an antidotally effective amount of a herbicide safener.

[0142] Seed treatment is useful for selective weed control, because it physically restricts antidoting to the crop plants. Therefore in one embodiment, a method for selectively controlling the growth of weeds in a field comprising treating the seed from which the crop is grown with an antidotally effective amount of safener and treating the field with an effective amount of herbicide to control weeds.

[0143] An antidotally effective amount of a safener is present where a desired plant is treated with the safener so that the effect of a herbicide on the plant is decreased in comparison to the effect of the herbicide on a plant that was not treated with the safener; generally, an antidotally effective amount of safener prevents damage or severe damage to the plant treated with the safener. One of skill in the art is capable of determining whether the use of a safener is appropriate and determining the dose at which a safener should be administered to a crop.

[0144] As used herein, an “adjuvant” is any material added to a spray solution or formulation to modify the action of an agricultural chemical or the physical properties of the spray solution. See, for example, Green and Foy (2003) “Adjuvants: Tools for Enhancing Herbicide Performance,” in Weed Biology and Management, ed. Inderjit (Kluwer Academic Publishers, The Netherlands). Adjuvants can be categorized or subclassified as activators, acidifiers, buffers, additives, adherents, antiflocculants, antifoamers, defoamers, antifreezes, attractants, basic blends, chelating agents, cleaners, colorants or dyes, compatibility agents, cosolvents, couplers, crop oil concentrates, deposition agents, detergents, dispersants, drift control agents, emulsifiers, evaporation reducers, extenders, fertilizers, foam markers, formulants, inerts, humectants, methylated seed oils, high load COCs, polymers, modified vegetable oils, penetrators, repellants, petroleum oil concentrates, preservatives, rainfast agents, retention aids, solubilizers, surfactants, spreaders, stickers, spreader stickers, synergists, thickeners, translocation aids, uv protectants, vegetable oils, water conditioners, and wetting agents.

[0145] In addition, methods of the invention can comprise the use of a herbicide or a mixture of herbicides, as well as, one or more other insecticides, fungicides, nematocides, bactericides, acaricides, growth regulators, chemosterilants, semiochemicals, repellents, attractants, pheromones, feeding stimulants or other biologically active compounds or entomopathogenic bacteria, virus, or fungi to form a multi-component mixture giving an even broader spectrum of agricultural protection. Examples of such agricultural protectants which can be used in methods of the invention include: insecticides such as abamectin, acephate, acetamiprid, amidoflumet (S-1955), avermectin, azadirachtin, azinphos-methyl, bifenthrin, bifenazate, buprofezin, carbofuran, cartap, chlorfenapyr, chlorfluazuron, chlorpyrifos, chlorpyrifos-methyl, chromafenozide, clothianidin, cyflumetofen, cyfluthrin, beta-cyfluthrin, cyhalothrin, lambda-cyhalothrin, cypermethrin, cyromazine, deltamethrin, diafenthiuron, diazinon, dieldrin, diflubenzuron, dimefluthrin, dimethoate, dinotefuran, diofenolan, emamectin, endosulfan, esfenvalerate, ethiprole, fenothiocarb, fenoxycarb, fenpropathrin, fenvalerate, fipronil, flonicamid, flubendiamide, flucythrinate, tau-fluvalinate, flufenerim (UR-50701), flufenoxuron, fonophos, halofenozide, hexaflumuron, hydramethylnon, imidacloprid, indoxacarb, isofenphos, lufenuron, malathion, metaflumizone, metaldehyde, methamidophos, methidathion, methomyl, methoprene, methoxychlor, metofluthrin, monocrotophos, methoxyfenozide, nitenpyram, nithiazine, novaluron, noviflumuron (XDE-007), oxamyl, parathion, parathion-methyl, permethrin, phorate, phosalone, phosmet, phosphamidon, pirimicarb, profenofos, profluthrin, pymetrozine, pyrafluprole, pyrethrin, pyridalyl, pyriprole, pyriproxyfen, rotenone, ryanodine, spinosad, spirodiclofen, spiromesifen (BSN 2060), spirotetramat, sulprofos, tebufenozide, teflubenzuron, tefluthrin, terbufos, tetrachlorvinphos, thiacloprid, thiamethoxam, thiodicarb, thiosultap-sodium, tralomethrin, triazamate, trichlorfon and triflumuron; fungicides such as acibenzolar, aldimorph, amisulbrom, azaconazole, azoxystrobin, benalaxyl, benomyl, benthiavalicarb, benthiavalicarb-isopropyl, binomial, biphenyl, bitertanol, blasticidin-S, Bordeaux mixture (Tribasic copper sulfate), boscalid/nicobifen, bromuconazole, bupirimate, buthiobate, carboxin, carpropamid, captafol, captan, carbendazim, chloroneb, chlorothalonil, chlozolinate, clotrimazole, copper oxychloride, copper salts such as copper sulfate and copper hydroxide, cyazofamid, cyflunamid, cymoxanil, cyproconazole, cyprodinil, dichlofluanid, diclocymet, diclomezine, dicloran, diethofencarb, difenoconazole, dimethomorph, dimoxystrobin, diniconazole, diniconazole-M, dinocap, discostrobin, dithianon, dodemorph, dodine, econazole, etaconazole, edifenphos, epoxiconazole, ethaboxam, ethirimol, ethridiazole, famoxadone, fenamidone, fenarimol, fenbuconazole, fencaramid, fenfuram, fenhexamide, fenoxanil, fenpiclonil, fenpropidin, fenpropimorph, fentin acetate, fentin hydroxide, ferbam, ferfurazoate, ferimzone, fluazinam, fludioxonil, flumetover, fluopicolide, fluoxastrobin, fluquinconazole, fluquinconazole, flusilazole, flusulfamide, flutolanil, flutriafol, folpet, fosetyl-aluminum, fuberidazole, furalaxyl, furametapyr, hexaconazole, hymexazole, guazatine, imazalil, imibenconazole, iminoctadine, iodicarb, ipconazole, iprobenfos, iprodione, iprovalicarb, isoconazole, isoprothiolane, kasugamycin, kresoxim-methyl, mancozeb, mandipropamid, maneb, mapanipyrin, mefenoxam, mepronil, metalaxyl, metconazole, methasulfocarb, metiram, metominostrobin/fenominostrobin, mepanipyrim, metrafenone, miconazole, myclobutanil, neo-asozin (ferric methanearsonate), nuarimol, octhilinone, ofurace, orysastrobin, oxadixyl, oxolinic acid, oxpoconazole, oxycarboxin, paclobutrazol, penconazole, pencycuron, penthiopyrad, perfurazoate, phosphonic acid, phthalide, picobenzamid, picoxystrobin, polyoxin, probenazole, prochloraz, procymidone, propamocarb, propamocarb-hydrochloride, propiconazole, propineb, proquinazid, prothioconazole, pyraclostrobin, pryazophos, pyrifenox, pyrimethanil, pyrifenox, pyrolnitrine, pyroquilon, quinconazole, quinoxyfen, quintozene, silthiofam, simeconazole, spiroxamine, streptomycin, sulfur, tebuconazole, techrazene, tecloftalam, tecnazene, tetraconazole, thiabendazole, thifluzamide, thiophanate, thiophanate-methyl, thiram, tiadinil, tolclofos-methyl, tolyfluanid, triadimefon, triadimenol, triarimol, triazoxide, tridemorph, trimoprhamide tricyclazole, trifloxystrobin, triforine, triticonazole, uniconazole, validamycin, vinclozolin, zineb, ziram, and zoxamide; nematocides such as aldicarb, oxamyl and fenamiphos; bactericides such as streptomycin; acaricides such as amitraz, chinomethionat, chlorobenzilate, cyhexatin, dicofol, dienochlor, etoxazole, fenazaquin, fenbutatin oxide, fenpropathrin, fenpyroximate, hexythiazox, propargite, pyridaben and tebufenpyrad; and biological agents including entomopathogenic bacteria, such as Bacillus thuringiensis subsp. Aizawai, Bacillus thuringiensis subsp. Kurstaki, and the encapsulated delta-endotoxins of Bacillus thuringiensis (e.g., Cellcap, MPV, MPVII); entomopathogenic fungi, such as green muscardine fungus; and entomopathogenic virus including baculovirus, nucleopolyhedro virus (NPV) such as HzNPV, AfNPV; and granulosis virus (GV) such as CpGV.

[0146] The methods of controlling weeds can further include the application of a biologically effective amount of a herbicide of interest or a mixture of herbicides, and an effective amount of at least one additional biologically active compound or agent and can further comprise at least one of a surfactant, a solid diluent or a liquid diluent. Examples of such biologically active compounds or agents are: insecticides such as abamectin, acephate, acetamiprid, amidoflumet (S-1955), avermectin, azadirachtin, azinphos-methyl, bifenthrin, binfenazate, buprofezin, carbofuran, chlorfenapyr, chlorfluazuron, chlorpyrifos, chlorpyrifos-methyl, chromafenozide, clothianidin, cyfluthrin, beta-cyfluthrin, cyhalothrin, lambda-cyhalothrin, cypermethrin, cyromazine, deltamethrin, diafenthiuron, diazinon, diflubenzuron, dimethoate, diofenolan, emamectin, endosulfan, esfenvalerate, ethiprole, fenothicarb, fenoxycarb, fenpropathrin, fenvalerate, fipronil, flonicamid, flucythrinate, tau-fluvalinate, flufenerim (UR-50701), flufenoxuron, fonophos, halofenozide, hexaflumuron, imidacloprid, indoxacarb, isofenphos, lufenuron, malathion, metaldehyde, methamidophos, methidathion, methomyl, methoprene, methoxychlor, monocrotophos, methoxyfenozide, nithiazin, novaluron, noviflumuron (XDE-007), oxamyl, parathion, parathion-methyl, permethrin, phorate, phosalone, phosmet, phosphamidon, pirimicarb, profenofos, pymetrozine, pyridalyl, pyriproxyfen, rotenone, spinosad, spiromesifin (BSN 2060), sulprofos, tebufenozide, teflubenzuron, tefluthrin, terbufos, tetrachlorvinphos, thiacloprid, thiamethoxam, thiodicarb, thiosultap-sodium, tralomethrin, trichlorfon and triflumuron; fungicides such as acibenzolar, azoxystrobin, benomyl, blasticidin-S, Bordeaux mixture (tribasic copper sulfate), bromuconazole, carpropamid, captafol, captan, carbendazim, chloroneb, chlorothalonil, copper oxychloride, copper salts, cyflufenamid, cymoxanil, cyproconazole, cyprodinil, (S)-3,5-dichloro-N-(3-chloro-1-ethyl-1-methyl-2-oxopropyl)-4-methylbenzamide (RH 7281), diclocymet (S-2900), diclomezine, dicloran, difenoconazole, (S)-3,5-dihydro-5-methyl-2-(methylthio)-5-phenyl-3-(phenyl-amino)-4H-imidazol-4-one (RP 407213), dimethomorph, dimoxystrobin, diniconazole, diniconazole-M, dodine, edifenphos, epoxiconazole, famoxadone, fenamidone, fenarimol, fenbuconazole, fencaramid (SZX0722), fenpiclonil, fenpropidin, fenpropimorph, fentin acetate, fentin hydroxide, fluazinam, fludioxonil, flumetover (RPA 403397), flumorf/flumorlin (SYP-L190), fluoxastrobin (HEC 5725), fluquinconazole, flusilazole, flutolanil, flutriafol, folpet, fosetyl-aluminum, furalaxyl, furametapyr (S-82658), hexaconazole, ipconazole, iprobenfos, iprodione, isoprothiolane, kasugamycin, kresoxim-methyl, mancozeb, maneb, mefenoxam, mepronil, metalaxyl, metconazole, metomino-strobin/fenominostrobin (SSF-126), metrafenone (AC375839), myclobutanil, neo-asozin (ferric methane-arsonate), nicobifen (BAS 510), orysastrobin, oxadixyl, penconazole, pencycuron, probenazole, prochloraz, propamocarb, propiconazole, proquinazid (DPX-KQ926), prothioconazole (JAU 6476), pyrifenox, pyraclostrobin, pyrimethanil, pyroquilon, quinoxyfen, spiroxamine, sulfur, tebuconazole, tetraconazole, thiabendazole, thifluzamide, thiophanate-methyl, thiram, tiadinil, triadimefon, triadimenol, tricyclazole, trifloxystrobin, triticonazole, validamycin and vinclozolin; nematocides such as aldicarb, oxamyl and fenamiphos; bactericides such as streptomycin; acaricides such as amitraz, chinomethionat, chlorobenzilate, cyhexatin, dicofol, dienochlor, etoxazole, fenazaquin, fenbutatin oxide, fenpropathrin, fenpyroximate, hexythiazox, propargite, pyridaben and tebufenpyrad; and biological agents including entomopathogenic bacteria, such as Bacillus thuringiensis subsp. Aizawai, Bacillus thuringiensis subsp. Kurstaki, and the encapsulated delta-endotoxins of Bacillus thuringiensis (e.g., Cellcap, MPV, MPVII); entomopathogenic fungi, such as green muscardine fungus; and entomopathogenic virus including baculovirus, nucleopolyhedro virus (NPV) such as HzNPV, AfNPV; and granulosis virus (GV) such as CpGV. Methods of the invention may also comprise the use of plants genetically transformed to express proteins (such as Bacillus thuringiensis delta-endotoxins) toxic to invertebrate pests. In such embodiments, the effect of exogenously applied invertebrate pest control compounds may be synergistic with the expressed toxin proteins. General references for these agricultural protectants include The Pesticide Manual, 13th Edition, C. D. S. Tomlin, Ed., British Crop Protection Council, Farnham, Surrey, U.K., 2003 and The BioPesticide Manual, 2^{nd} Edition, L. G. Copping, Ed., British Crop Protection Council, Farnham, Surrey, U.K., 2001. In certain instances, combinations with other invertebrate pest control compounds or agents having a similar spectrum of control but a different mode of action will be particularly advantageous for resistance management. Thus, compositions of the present invention can further comprise a biologically effective amount of at least one additional invertebrate pest control compound or agent having a similar spectrum of control but a different mode of action. Contacting a plant genetically modified to express a plant protection compound (e.g., protein) or the locus of the plant with a biologically effective amount of a compound of this invention can also provide a broader spectrum of plant protection and be advantageous for resistance management.

[0147] Thus, methods of controlling weeds can employ a herbicide or herbicide combination and may further comprise the use of insecticides and/or fungicides, and/or other agricultural chemicals such as fertilizers. The use of such combined treatments of the invention can broaden the spectrum of activity against additional weed species and suppress the proliferation of any resistant biotypes.

[0148] Methods can further comprise the use of plant growth regulators such as aviglycine, N-(phenylmethyl)-1H-purin-6-amine, ethephon, epocholeone, gibberellic acid, gibberellin A₄ and A₇, harpin protein, mepiquat chloride, prohexadione calcium, prohydrojasmon, sodium nitrophenolate and trinexapac-methyl, and plant growth modifying organisms such as Bacillus cereus strain BP01.

### IIX. Sequence Comparisons

[0149] The following terms are used to describe the sequence relationships between two or more polynucleotides or polypeptides: (a) “reference sequence”, (b) “comparison window”, (c) “sequence identity”, and, (d) “percent sequence identity.”

[0150] (a) As used herein, “reference sequence” is a defined sequence used as a basis for sequence comparison. A reference sequence may be a subset or the entirety of a specified sequence; for example, as a segment of a full-length cDNA or gene sequence, or the complete cDNA or gene sequence or protein sequence.

[0151] (b) As used herein, “comparison window” makes reference to a contiguous and specified segment of a polypeptide sequence, wherein the polypeptide sequence in the comparison window may comprise additions or deletions (i.e., gaps) compared to the reference sequence (which does not comprise additions or deletions) for optimal alignment of the two polypeptides. Generally, the comparison window is at least 5, 10, 15, or 20 contiguous amino acid in length, or it can be 30, 40, 50, 100, or longer. Those of skill in the art understand that to avoid a high similarity to a reference sequence due to inclusion of gaps in the polypeptide sequence a gap penalty is typically introduced and is subtracted from the number of matches.

[0152] Methods of alignment of sequences for comparison are well known in the art. Thus, the determination of percent sequence identity between any two sequences can be accomplished using a mathematical algorithm. Non-limiting examples of such mathematical algorithms are the algorithm of Myers and Miller (1988) CABIOS 4:11-17; the local alignment algorithm of Smith et al. (1981) Adv. Appl. Math. 2:482; the global alignment algorithm of Needleman and Wunsch (1970) J. Mol. Biol. 48:443-453; the search-for-local alignment method of Pearson and Lipman (1988) Proc. Natl. Acad. Sci. 85:2444-2448; the algorithm of Karlin and Altschul (1990) Proc. Natl. Acad. Sci. USA 872264, modified as in Karlin and Altschul (1993) Proc. Natl. Acad. Sci. USA 90:5873-5877.

[0153] Computer implementations of these mathematical algorithms can be utilized for comparison of sequences to determine sequence identity. Such implementations include, but are not limited to: CLUSTAL in the PC/Gene program (available from Intelligenetics, Mountain View, Calif.); the ALIGN program (Version 2.0) and GAP, BESTFIT, BLAST, FASTA, and TFASTA in the GCG Wisconsin Genetics Software Package, Version 10 (available from Accelrys Inc., 9685 Scranton Road, San Diego, Calif., USA). Alignments using these programs can be performed using the default parameters. The CLUSTAL program is well described by Higgins et al. (1988) Gene 73:237-244 (1988); Higgins et al. (1989) CABIOS 5:151-153; Corpet et al. (1988) Nucleic Acids Res. 16: 10881-90; Huang et al. (1992) CABIOS 8:155-65; and Pearson et al. (1994) Meth. Mol. Biol. 24:307-331. The ALIGN program is based on the algorithm of Myers and Miller (1988) supra. A PAM120 weight residue table, a gap length penalty of 12, and a gap penalty of 4 can be used with the ALIGN program when comparing amino acid sequences. The BLAST programs of Altschul et at (1990) J. Mol. Biol. 215:403 are based on the algorithm of Karlin and Altschul (1990) supra. BLAST nucleotide searches can be performed with the BLASTN program, score=100, wordlength=12, to obtain nucleotide sequences homologous to a nucleotide sequence encoding a protein of the invention. BLAST protein searches can be performed with the BLASTX program, score=50, wordlength=3, to obtain amino acid sequences homologous to a protein or polypeptide of the invention. BLASTP protein searches can be performed using default parameters. See, blast.ncbi.nlm.nih.gov/Blast.cgi.

To obtain gapped alignments for comparison purposes, Gapped BLAST (in BLAST 2.0) can be utilized as described in Altschul et al. (1997) Nucleic Acids Res. 25:3389. Alternatively, PSI-BLAST (in BLAST 2.0) can be used to perform an iterated search that detects distant relationships between molecules. See Altschul et al. (1997) supra. When utilizing BLAST, Gapped BLAST, or PSI-BLAST, the default parameters of the respective programs (e.g., BLASTN for nucleotide sequences, BLASTP for proteins) can be used. See www.ncbi.nlm.nih.gov. Alignment may also be performed manually by inspection.

[0154] Unless otherwise stated, sequence identity values provided herein refer to the value obtained using GAP Version 10 using the following parameters: % identity and % similarity for an amino acid sequence using GAP Weight of 8 and Length Weight of 2, and the BLOSUM62 scoring matrix; or any equivalent program thereof. By “equivalent program” is intended any sequence comparison program that, for any two sequences in question, generates an alignment having identical nucleotide or amino acid residue matches and an identical percent sequence identity when compared to the corresponding alignment generated by GAP Version 10.

[0155] GAP uses the algorithm of Needleman and Wunsch (1970) J. Mol. Biol. 48:443-453, to find the alignment of two complete sequences that maximizes the number of matches and minimizes the number of gaps. GAP considers all possible alignments and gap positions and creates the alignment with the largest number of matched bases and the fewest gaps. It allows for the provision of a gap creation penalty and a gap extension penalty in units of matched bases. GAP must make a profit of gap creation penalty number of matches for each gap it inserts. If a gap extension penalty greater than zero is chosen, GAP must, in addition, make a profit for each gap inserted of the length of the gap times the gap extension penalty. Default gap creation penalty values and gap extension penalty values in Version 10 of the GCG Wisconsin Genetics Software Package for protein sequences are 8 and 2, respectively. For nucleotide sequences the default gap creation penalty is 50 while the default gap extension penalty is 3. The gap creation and gap extension penalties can be expressed as an integer selected from the group of integers consisting of from 0 to 200. Thus, for example, the gap creation and gap extension penalties can be 0, 1, 2, 3, 4, 5, 6, 7, 8, 9, 10, 15, 20, 25, 30, 35, 40, 45, 50, 55, 60, 65 or greater.

[0156] GAP presents one member of the family of best alignments. There may be many members of this family, but no other member has a better quality. GAP displays four figures of merit for alignments: Quality, Ratio, Identity, and Similarity. The Quality is the metric maximized in order to align the sequences. Ratio is the quality divided by the number of bases in the shorter segment. Percent Identity is the percent of the symbols that actually match. Percent Similarity is the percent of the symbols that are similar. Symbols that are across from gaps are ignored. A similarity is scored when the scoring matrix value for a pair of symbols is greater than or equal to 0.50, the similarity threshold. The scoring matrix used in Version 10 of the GCG Wisconsin Genetics Software Package is BLOSUM62 (see Henikoff and Henikoff (1989) Proc. Natl. Acad. Sci. USA 89:10915).

[0157] (c) As used herein, “sequence identity” or “identity” in the context of two polynucleotides or polypeptide sequences makes reference to the residues in the two sequences that are the same when aligned for maximum correspondence over a specified comparison window. When percentage of sequence identity is used in reference to proteins it is recognized that residue positions which are not identical often differ by conservative amino acid substitutions, where amino acid residues are substituted for other amino acid residues with similar chemical properties (e.g., charge or hydrophobicity). When sequences differ in conservative substitutions, the percent sequence identity may be adjusted upwards to correct for the conservative nature of the substitution. Sequences that differ by such conservative substitutions are said to have “sequence similarity” or “similarity”. Means for making this adjustment are well known to those of skill in the art. Typically this involves scoring a conservative substitution as a partial rather than a full mismatch, thereby increasing the percent sequence identity. Thus, for example, where an identical amino acid is given a score of 1 and a non-conservative substitution is given a score of zero, a conservative substitution is given a score between zero and 1. The scoring of conservative substitutions is calculated, e.g., as implemented in the program PC/GENE (Intelligenetics, Mountain View, Calif.).

[0158] (d) As used herein, “percent sequence identity” means the value determined by comparing two optimally aligned sequences over a comparison window, wherein the portion of the polynucleotide sequence in the comparison window may comprise additions or deletions (i.e., gaps) as compared to the reference sequence (which does not comprise additions or deletions) for optimal alignment of the two sequences. The percentage is calculated by determining the number of positions at which the identical nucleic acid base or amino acid residue occurs in both sequences to yield the number of matched positions, dividing the number of matched positions by the total number of positions in the window of comparison, and multiplying the result by 100 to yield the percent sequence identity.

[0159] (e) Two sequences are “optimally aligned” when they are aligned for similarity scoring using a defined amino acid substitution matrix (e.g., BLOSUM62), gap existence penalty and gap extension penalty so as to arrive at the highest score possible for that pair of sequences. Amino acids substitution matrices and their use in quantifying the similarity between two sequences are well-known in the art and described, e.g., in Dayhoff et al. (1978) “A model of evolutionary change in proteins.” In “Atlas of Protein Sequence and Structure,” Vol. 5, Suppl. 3 (ed. M. O. Dayhoff), pp. 345-352. Natl. Biomed. Res. Found., Washington, D.C. and Henikoff et al. (1992) Proc. Natl. Acad. Sci. USA 89:10915-10919. The BLOSUM62 matrix is often used as a default scoring substitution matrix in sequence alignment protocols such as Gapped BLAST 2.0. The gap existence penalty is imposed for the introduction of a single amino acid gap in one of the aligned sequences, and the gap extension penalty is imposed for each additional empty amino acid position inserted into an already opened gap. The gap existence penalty is imposed for the introduction of a single amino acid gap in one of the aligned sequences, and the gap extension penalty is imposed for each additional empty amino acid position inserted into an already opened gap. The alignment is defined by the amino acids positions of each sequence at which the alignment begins and ends, and optionally by the insertion of a gap or multiple gaps in one or both sequences, so as to arrive at the highest possible score. While optimal alignment and scoring can be accomplished manually, the process is facilitated by the use of a computer-implemented alignment algorithm, e.g., gapped BLAST 2.0, described in Altschul et al, (1997) Nucleic Acids Res. 25:3389-3402, and made available to the public at the National Center for Biotechnology Information Website (http://www.ncbi.nlm.nih.gov). Optimal alignments, including multiple alignments, can be prepared using, e.g., PSI-BLAST, available through http://www.ncbi.nlm.nih.gov and described by Altschul et al, (1997) Nucleic Acids Res. 25:3389-3402.

[0160] Non-limiting embodiments include:

[0161] 1. A method to detoxify an auxin-analog herbicide comprising applying to a plant, a plant cell or a seed an auxin-analog herbicide, wherein said plant, plant cell or seed comprises a heterologous polynucleotide encoding a GH3 polypeptide having amino acid/auxin-analog conjugation activity, and wherein expression of the GH3 polypeptide produces an aspartate/auxin-analog conjugate or a glutamate/auxin-analog conjugate wherein said auxin-analog conjugate has reduced herbicidal activity.

[0162] 2. A method for controlling at least one weed in an area of cultivation comprising a crop or a seed of the crop, said method comprising applying to the area of cultivation and/or applying to the crop or a seed of the crop in the area of cultivation a sufficient amount of an auxin-analog herbicide to control weeds without significantly affecting the crop, wherein said crop or seed thereof in said area of cultivation comprises at least one heterologous polynucleotide encoding a GH3 polypeptide having amino acid/auxin-analog conjugation activity.

[0163] 3. A method for controlling at least one weed in an area of cultivation containing a crop comprising

[0164] (a) applying to the area of cultivation a sufficient amount of an auxin-analog herbicide to control weeds without significantly affecting the crop;

[0165] (b) planting the field with a crop or a seed thereof having a heterologous polynucleotide encoding a GH3 polypeptide having amino acid/auxin-analog conjugation activity.

[0166] 4. The method of any one of embodiments 2 or 3, wherein said crop exhibits an increased insensitivity to the auxin-analog herbicide as compared to an appropriate control plant.

[0167] 5. The method of embodiment 3, wherein step (a) occurs before or simultaneously with step (b).

[0168] 6. The method of embodiment 1, 2, 3, 4, or 5, wherein said GH3 polypeptide comprises a polypeptide having an amino acid sequence having at least 85%, 90%, 95% or 100% sequence identity to any one of SEQ ID NO: 1, 2, 3, 4, 5, 6, 7, 8, 9, 10, 11, 12, 13, 14, 33, 34, 35, 36, 37, 38, 39, 40, 41, 42, 43, 44, 45, 46, 47, 48, 49, 50, 58, 68, 69, 70, 71, 72, 73, 74, 75, 76, 77, 78, 79, 80, 81, 82, 83, 84, 85, 86, 87, 88, 89, 90, 91, 92, 93, 94, 95, 96, 97, 117, 118, 119, 120, 121, 124, 142, 144, or 145.

[0169] 7. The method of embodiment 1, 2, 3, 4, or 5, wherein said GH3 polypeptide comprises a polypeptide having an amino acid sequence having at least 80%, 85%, 90%, 95% or 100% sequence identity to any one of SEQ ID NO: 15, 16, 17, 51, 52, 53, 54, 55, 56, 57, 59, 60, 61, 62, 63, 64, 65, 66, 67, 98, 99, 100, 101, 102, 103, 104, 105, 106, 107, 108, 109, 110, 111, 112, 113, 114, 115, 116, 122, 134, 135, 136, 137, 138, 139, 140, 141.

[0170] 8. The method of embodiment 1, 2, 3, 4, or 5, wherein said GH3 polypeptide comprises a polypeptide having an amino acid sequence having at least 80%, 85%, 90%, 95% or 100% sequence identity to any one of SEQ ID NO: 18, 19, 20, 21, 22, 23, 24, 25, 26, 27, 28, 29, 30, 31, 32, 123, 125, 126, 127, 128, 129, 130, 131, 132, 133, or 143.

[0171] 9. The method of any one of embodiments 1-8, wherein said auxin-analog herbicide comprises 2,4-D or dicamba.

[0172] 10. The method of any one of embodiments 2-5, wherein said crop further comprises at least one polypeptide imparting tolerance to an additional herbicide. 11. The method of embodiment 10, wherein said at least one polypeptide imparting tolerance to an additional herbicide comprises:
[0173] (a) a sulfonylurea-tolerant acetolactate synthase;
[0174] (b) an imidazolinone-tolerant acetolactate synthase;
[0175] (c) a glyphosate-tolerant 5-enolpyruvylshikimate-3-phosphate synthase;
[0176] (d) a glyphosate-tolerant glyphosate oxido-reductase;
[0177] (e) a glyphosate-N-acetyltransferase;
[0178] (f) a phosphinothricin acetyl transferase;
[0179] (g) a protoporphyrinogen oxidase;
[0180] (h) an HPPD enzyme;
[0181] (i) a P450 polypeptide; or,
[0182] (j) an acetyl coenzyme A carboxylase (ACCase).

[0183] 12. The method of embodiment 11, wherein said at least one polypeptide imparting tolerance to an additional herbicide comprises a high resistance allele of acetolactate synthase (HRA) and/or a glyphosate-N-acetyltransferase polypeptide.

[0184] 13. The method of any one of embodiments 2-5, wherein the crop further comprises at least one additional polypeptide imparting tolerance to an auxin-analog herbicide, wherein said additional polypeptide is either the same or different than said GH3 polypeptide encoded by the heterologous polynucleotide.

[0185] 14. The method of embodiment 1, wherein said plant, plant cell or seed is from a monocot.

[0186] 15. The method of embodiment 1, wherein said plant, plant cell or seed is from a dicot.

[0187] 16. The method of embodiment 2 or 3, wherein said crop is from a monocot.

[0188] 17. The method of embodiment 2 or 3, wherein said crop is from a dicot.

[0189] 18. The method of any one of embodiments 14 or 16, wherein said monocot plant is selected from the group consisting of maize, wheat, rice, barley, sorghum, or rye.

[0190] 19. The method of any one of embodiments 15 or 17, wherein said dicot plant is selected from the group consisting of soybean, Brassica, sunflower, cotton, or alfalfa.

[0191] 20. The method of any one of embodiments 1-19, wherein said auxin-analog herbicide comprises 2,4-D.

[0192] 21. The method of any one of embodiments 1-19, wherein said auxin-analog herbicide comprises dicamba.

[0193] 22. A method for testing a plant response to one or more compounds, comprising,
[0194] a) providing a composition comprising one or more compounds to be tested in a container having at least an opening for the compound enter and/or exit, and one or more elements for moving the composition into or out of the container;
[0195] b) contacting at least one opening of the container with the surface of a plant and moving the composition comprising one or more compounds to at least the surface of the plant.

[0196] 23. The method of embodiment 22, wherein the container and elements for moving the composition comprise a syringe body and plunger.

[0197] 24. The method of embodiment 22, wherein moving the composition to the plant surface comprises contacting the surface with pressure sufficient for the composition to enter the cells of the plant.

[0198] 25. The method of embodiment 22, further comprising measuring an effect of the composition on the contacted plant compared to a plant that is not contacted with the composition.

### EXPERIMENTAL

### Abbreviations

[0199] The following abbreviations are used: IAA: indole-3-acetic acid; 2,4-D: 2,4-dichlorophenoxyacetic acid; and dicamba: 3,6-dichloro-2-methoxybenzoic acid free acid. Conjugated forms of IAA, 2,4-D, and dicamba are indicated by appending as a suffix a dash with the three letter code for amino acid conjugated to the compound. For example, IAA conjugated to aspartic acid is indicated as IAA-Asp or 2,4-D conjugated to glutamic acid is indicated as 2,4-D-Glu.

### Example 1

### Methods for Measuring Auxin Conjugation Activities

[0200] Auxin amino acid conjugation is a two step enzymatic reaction. The first step involves adenylation: the transfer of AMP from ATP to the carboxylic acid group of an acyl substrate, forming an activated acyl-adenylate intermediate and releasing pyrophosphate (PPᵢ). The second step involves a transferase reaction replacing AMP of the intermediate with an amino acid by the formation of an amide bond (See FIGS. 1 and 2).

[0201] Adenylation activity was monitored spectrophotometrically at 340 nm by coupling the production of pyrophosphate to oxidation of NADH using a pyrophosphate reagent (Sigma reagent catalog number P7275). Coupling enzymes including pyrophosphate dependent fructose-6-phosphate kinase, aldolase, triosephosphate isomerase, glycerophosphate dehydrogenase, and appropriate substrates and cofactors including NADH are all included in the reagent kit. To start the assay, the pyrophosphate reagent was reconstituted in 4 mL of double-distilled H₂O (“ddH₂O”). A master mix containing 6.45 mM MgCl₂, 3.23 mM ATP, 1.29 mM DTT, and 65 μL pyrophosphate reagent in a total of 155 μL was prepared and added into a UV plate containing 10 μg GH3 enzyme and 20 μl of 10 mM auxin or auxin herbicide for final concentration of 1 mM. The reaction volume was brought to 200 μl by the addition of ddH₂O. The reaction plate was measured using a SpectraMax Plus 384 device (Molecular Devices) for changes in absorbance at 340 nm every 30 s for 1 hr at 30° C. Measured absorbance was then converted to velocity by least squares fitting of each curve using the accompanying program SOFTmax PRO 5.4 with manual assessment/confirmation of the linear range. The velocity of a no-auxin control was subtracted. An extinction coefficient of 6.22 mM⁻¹ cm⁻¹ for NADH was used to convert velocity values from milli-absorbance units/min to micromolar/min. Kinetic parameters were estimated by fitting initial velocity values to the Michaelis-Menten equation.

[0202] The second step of the conjugation was measured spectrophotometrically at 340 nm for oxidation of NADH by enzyme coupled assay (Chen et al. 2010. J Biol Chem 285:29780-29786). This method measures the release of AMP from the acyl-adenylate intermediate. Coupled enzymes include: myokinase, pyruvate kinase, and lactic acid dehydrogenase. To start the assay, a master mix containing 20 mM Tris-HCl (pH 8.0), 3 mM MgCl₂, 2 mM ATP, 4 mM of auxin or auxin herbicide substrate, 6 mM amino acid, 2 mM DTT, 2 mM phosphoenolpyruvate, 400 μM NADH, 8 units/100 μL of rabbit muscle myokinase, 8 units/100 μL of rabbit muscle pyruvate kinase, and 8 units/100 μL of rabbit muscle lactate dehydrogenase was prepared. 100 μl master mix was added to a UV microplate containing 10 μg GH3 protein in 100 μl reaction buffer (20 mM Tris-HCl, 3 mM MgCl₂ pH 8.0). The reaction plate was measured in SpectraMax Plus 384 device (Molecular Devices) for changes in absorbance at 340 nm every 30 s for 1 hr at 30° C. Measured absorbance was then converted to velocity by least squares fitting of each curve using the accompanying program SOFTmax PRO 5.4 with manual assessment/confirmation of the linear range. The velocity of a no-auxin control was subtracted. An extinction coefficient of 6.22 mM⁻¹ cm⁻¹ for NADH was used to convert velocity values from milli-absorbance units/min to micromolar/min. Kinetic parameters were estimated by fitting initial velocity values to the Michaelis-Menten equation.

[0203] To detect and monitor the formation of acyl conjugates with 2,4-D or dicamba, a sensitive LC-MS method was developed using the respective amino acid conjugate standards. With this procedure, the level of 2,4-D-Asp, 2,4-D-Glu, dicamba-Asp, and dicamba-Glu were detected as low as 2.5 fmol, 5 fmol, 20 fmol, and 20 fmol, respectively. The detection limit for IAA-Asp and IAA-Glu is comparable at 25 fmol. The reaction was performed at 30° C., 105 rpm, for 3 hours in buffer containing 20 mM Tris-HCl (pH 8.0), 5 mM MgCl₂, 5 mM auxin (IAA, 2,4-D or dicamba), 5 mM ATP, 5 mM Asp or Glu, 1 mM DTT and 44 to 164 μg/mL purified GH3 protein in 100 μL reaction. After 3 hours of reaction, 400 μL 100% MeOH was added to the reaction mixture for protein precipitation. The supernatant was diluted 20× in water and then analyzed by LC-MS (AB Sciex 4000 QTrap coupled with Shimadzu Nexera UHPLC) using a Phenomenex Luna 3 μm Phenyl-Hexyl (00B-4256-Y0) column. Details of the LC-MS method are listed in table 2. The concentration of the conjugates was calculated based on the standards. Kinetic parameters were estimated by fitting initial velocity values to the Michaelis-Menten equation.

TABLE 2
LC-MS methods for IAA, 2,4-D, dicamba and their conjugates.

| | | |
|---|---|---|
| Time (mins) | Solvent B % | MRM transition (m/z) |

Method for IAA, IAA-Asp and IAA-Glu detection

| | | | |
|---|---|---|---|
| 1 | 2 | IAA | 174 to 130 |
| 3 | 70 | IAA-Asp | 289 to 132 |
| 3.9 | 70 | IAA-Glu | 303 to 146 |
| 4 | 2 | | |
| 5 | stop | | |

Method for 2,4-D, 2,4-D-Asp and 2,4-D-Glu detection

| | | | |
|---|---|---|---|
| 1 | 5 | 2,4-D | 218 to 161 |
| 3 | 100 | 2,4-D-Asp | 334 to 161 |
| 3.9 | 100 | 2,4-D-Glu | 348 to 161 |
| 4 | 5 | | |
| 5 | stop | | |

Method for Dicamba, Dicamba-Asp and Dicamba-Glu detection

| | | | |
|---|---|---|---|
| 1 | 2 | Dicamba | 218 to 175 |
| 3 | 70 | Dicamba-Asp | 334 to 114 |
| 3.9 | 70 | Dicamba-Glu | 348 to 330 |
| 4 | 2 | | |
| 5 | stop | | |

Solvent A: 5 mM NH₄Ac in H₂O
Solvent B: 5 mM NH₄Ac in MeOH

### Example 2

### Phytotoxicity Evaluation of 2,4-D and Dicamba Conjugated with Aspartic Acid and Glutamic Acid

[0204] To evaluate the effect of synthetic auxin conjugates in plants, 2,4-D-Asp, 2,4-D-Glu, dicamba-Asp, and dicamba-Glu were synthesized (Irvine Chemistry Laboratory, Anaheim, Calif.) and tested for auxin effects during soybean germination.

[0205] Asp and Glu conjugates of 2,4-D and dicamba were dissolved in a small quantity of Na₂CO₃ and ethanol, respectively, diluted in ddH₂O to obtain 10 mM stock solution, and filter sterilized. Soybean seeds of a Pioneer elite germplasm were sterilized with chlorine gas as following: a) two layers of seeds were placed in a 100×25 mm plastic Petri dish; b) in an exhaust fume hood, seeds were placed into a glass desiccator with a 250 mL beaker containing 100 mL bleach (5% NaOC1) and 3.5 mL 12N HCl was slowly added to the beaker; c) the lid was sealed closed on the desiccator and the seeds sterilized for at least 24 hr.

[0206] Sterilized soybean seeds were then imbibed in ddH₂O under sterile conditions at 25° C. for 24 hours before germination test. For germination test, 6-8 imbibed seeds were placed on a 100×25 mm deep Petri dish plate containing 50 ml germination media supplemented with or without auxin herbicide conjugates. 1 L seed germination media contains 3.21 g GAMBORG B-5 basal medium (PhytoTech), 20 g sucrose, 5 g tissue culture agar, and is pH adjusted to 5.7. Media was autoclaved at 121° C. for 25 min and cooled to 60° C. before the addition of auxin conjugates. Germination was carried out in a Percival growth chamber at 25° C. under 18 hr light and 6 hr dark cycle at 90 to 150 μE/m2/s and grown for 10 days.

[0207] As shown in FIG. 3, soybean seeds germinated and grew very well in the media containing no supplemented auxin herbicides or auxin herbicide conjugates (control in FIG. 3). Cotyledons were fully expanded, the first true leaf emerged, and the roots grew well into the media. In plates where 1 μM 2,4-D or dicamba was added, seed germination was arrested as evident by bleaching of cotyledon and malformed and growth arrested roots. Emergence of true leaf and formation of secondary roots were not observed from these seeds. In comparison, in plates containing 1 μM of auxin herbicide conjugates 2,4-D-Asp, 2,4-D-Glu, dicamba-Asp, and dicamba-Glu, seed germination and growth were normal, similar to that of the control plates. The results indicate that these auxin herbicide conjugates are not phytotoxic to soybean. Converting 2,4-D or dicamba into Asp or Glu conjugates can effectively turn the herbicides into non-herbicidal compounds in plants.

### Example 3

### Phylogenetic Analysis of GH3 Family Proteins

[0208] A total of 246 GH3 protein sequences were obtained by BLAST analysis (Jun. 20, 2012) using AtGH3.17 protein sequence (Accession # Q9FZ87) to the NCBI database (http://www.ncbi.nlm.nih.gov/) and Pioneer internal database, and analyzed for their phylogenetic relationship using CLUSTAL W (FIG. 4). From this phylogenetic analysis, 145 GH3 homologs were selected for activity evaluation (FIG. 5, Table 3 and Table 6).

[0209] Based on previous studies of the substrate specificity of GH3 family proteins, three major subgroups have been proposed (Staswick et al. (2002) Plant Cell 14: 1405-1415; Wang et al. (2008) Plant Growth Regul 56:225-232). Subgroup I catalyzes the ligation of amino acids to jasmonic acid (Staswick et al. (2002) Plant Cell 14: 1405-1415). Auxins such as IAA, PAA, IBA and salicylic acid are the substrates of subgroup II (Staswick et al. (2002) Plant Cell 14: 1405-1415; Staswick et al. (2005) Plant Cell 17:616-627). Subgroup III protein AtGH3-12 can conjugate 4-hydroxybenzoate, and other benzoates (Okrent et al. (2009) J Biol Chem 284:9742-9754). As shown in FIG. 4, GH3 homologs fall into three major groups (Group A, B, C) in the phylogenetic analysis. From previous studies (Staswick et al. (2002) Plant Cell 14: 1405-1415; Staswick et al. (2005) Plant Cell 17:616-62; Wang et al. (2008) Plant Growth Regul 56:225-232; Okrent et al. (2009) J Biol Chem 284:9742-9754), proteins in phylogenetic group A, B, and C are predicted to belong to substrate subgroup I, II, and III, respectively, with substrate preference of jasmonic acid, IAA, and benzoates, respectively. This is not always true. For example, in the group of 78 tested GH3 proteins, 18 did not conjugate IAA with Asp or Glu. Most (14 out of 18) of these IAA-inactive GH3 proteins phylogenetically belong to subgroup A and C, confirming the general alignment of sequence group and substrate specificity (FIG. 6). However, the phylogenetic grouping does not align completely with the subgroups based on substrate specificity, as exemplified by the other four IAA-inactive proteins AtGH3-3, OsGH3-10, SbEES16535, and ZmACF88044, all belonging to subgroupB. Another example is with AtGH3.17, phylogenetically a subgroup C protein (FIGS. 4 and 6). However, AtGH3-17 conjugates IAA with Asp or Glu very well, with k_{cat} values at 52 and 868 hr⁻¹ respectively (Table 3 and 4; Staswick et al. (2005) Plant Cell 17:616-627), and thus is a subgroup II protein. Even though the pair-wise sequence identity among GH3 family proteins varies from 30% to 98%, we have identified proteins that can conjugate IAA to Asp or Glu from all substrate specificity subgroups. For example, subgroup C proteins AtGH3-7, AtGH3.12, AtGH3-19, AlGH3-14 and AlGH3-12 can also conjugate Glu to IAA (FIG. 6), the substrate of subgroup II but not subgroup III. Phylogenetic group A proteins PpGH3-2 and SmXP_{—}002981880 can also conjugate IAA to Asp and Glu (FIG. 6). Furthermore, proteins from sequence subgroups A, B and C all showed 2,4-D conjugation activity (FIG. 5 and Table 4 and 5). Thus, we conclude that phylogenetic placement itself is not enough to predict the substrate specificity of GH3 proteins and to identify proteins that can conjugate 2,4-D or dicamba to Asp or Glu.

### Example 4

### Examination of 145 GH3 Superfamily Protein Members with IAA, 2,4-D, and Dicamba in Conjugation Reaction with Aspartic Acid and Glutamic Acid

[0210] The GH3 superfamily conjugase activity analysis of IAA, 2,4-D or dicamba with Asp or Glu was done using LC-MS to analyze the final conjugate products as described in Example 1. Protein sequences of GH3 homologs (Table 3) were obtained from public databases (NCBI, http://www.ncbi.nlm.nih.gov/) by Blast analysis of AtGH3.17 protein sequence (accession # Q9FZ87). Coding sequences were designed for optimal expression in E. coli based on the protein sequences and synthesized. Synthesized coding sequences along with N-term his-tag coding sequences were cloned into a pET24a-based E. coli expression vector. The E. coli expression vectors were transformed into OverExpress C41(DE3) cells (Lucigen) for protein expression. Recombinant E. coli strains were inoculated into 5 ml LB media supplemented with 40 mg/L kanamycin and cultured overnight at 37° C. The overnight culture (0.5 mL) was inoculated into 50 mL LB medium plus 40 mg/L kanamycin and grown at 30° C. until OD₆₀₀ reached 0.6. The cultures were induced with 0.2 mM IPTG at 16° C., 230 rpm overnight. Cells were harvested by centrifugation at 7,000 rpm for 10 mins. The cell pellet from 50 mL of cell culture was frozen and thawed twice and then lysed in 800 μL lysis buffer A (150 mM NaCl, 50 mM Tris-HCl pH 8.0, 5 mM MgCl₂, 10% glycerol) plus 20 mM imidazole, 1 mM DTT, 0.2 mg/ml lysozyme, 1/200 protease inhibitor cocktail (EMD set3, EDTA free) and 1/2000 endonuclease. Lysate was then centrifuged at 13,000 rpm for 30 min at 4° C. Supernatant was loaded onto 200 μL Ni-NTA columns pre-equilibrated with buffer A with 20 mM imidazole at 4° C. Each column was then washed with (1) 2×800 μL of buffer A with 10 mM imidazole, (2) 2×800 μL of buffer A with 20 mM imidazole and (3) 2×200 μL of buffer A with 50 mM imidazole. Protein was eluted with 200 μL of buffer A with 250 mM imidazole. The concentration was measured by Bradford assay. Purified protein was used in conjugation reaction assays as described in example 1.

[0211] As shown in Tables 4 and 5, among the 78 tested GH3 proteins, most of them (70 GH3 proteins) showed various level of 2,4-D conjugation activity with Asp or Glu. Sixteen of them produced more than 1 μM of 2,4-D-Asp or 2,4-D-Glu from a reaction having 5 mM 2,4-D substrate (Table 4). The activity is usually less than the corresponding activity for IAA conjugation to Asp or Glu. In some cases, the conjugase is over 1,000-fold higher in k_{cat} with IAA as compared to 2,4-D (Table 5). However, twelve GH3 proteins that did not show any activity of conjugating IAA with Asp and Glu were found to produce 2,4-D-Asp or 2,4-D-Glu conjugates (FIG. 6, Table 4 and 5). These IAA-inactive 2,4-D conjugases are: AlGH3-9, AtGH3-9, OsGH3-7, OsGH3-11, PtGH3-14, VvGH3-8, AtGH3-13, AtGH3-14, ZmACF88044, PpGH3-1, SmXP_{—}002983845, and SmXP_{—}002986992 (SEQ ID NO 1, 4, 5, 6, 15, 16, 25, 26, 45, 51, 57, and 66). One active GH3 conjugase for both IAA and 2,4-D, PpGH3-2 (SEQ ID NO:52), could conjugate dicamba with Glu in the 16 hour reaction. Increased amount of dicamba-Glu was detected when increased amount of PpGH3-2 protein was used in the conjugation reaction (FIG. 7).

TABLE 3
Protein names of 145 selected GH3 proteins for activity test.

| SEQ ID | Protein name | Gene Bank Accession Number |
|---|---|---|
| 1 | AlGH3-9 | EFH58389 |
| 2 | AlGH3-17 | XP_002890761 |
| 3 | AtGH3-17 | Q9FZ87 |
| 4 | AtGH3-9 | O82243 |
| 5 | OsGH3-7 | Q654M1 |
| 6 | OsGH3-11 | P0C0M3 |
| 7 | OsGH3-13 | EAY81150 |
| 8 | PtGH3-7 | EEE84166 |
| 9 | PtGH3-8 | EEE78719 |
| 10 | PtGH3-9 | EEE81977 |
| 11 | RcGH3-17 | XP_002531876 |
| 12 | SbEES08587 | EES08587 |
| 13 | VvGH3-4 | XP_002263353 |
| 14 | VvGH3-6 | XP_002268278 |
| 15 | PtGH3-14 | EEE99364 |
| 16 | VvGH3-8 | XP_002271002 |
| 17 | OsGH3-6 | Q60EY1 |
| 18 | AlGH3-13 | EFH47822 |
| 19 | AlGH3-14 | EFH47823 |
| 20 | AlGH3-16 | EFH47825 |
| 21 | AlGH3-19 | EFH70384 |
| 22 | AlGH3-12 | XP_002871561 |
| 23 | AlGH3-7 | XP_002890567 |
| 24 | AtGH3-12 | Q9LYU4 |
| 25 | AtGH3-13 | CAB86642 |
| 26 | AtGH3-14 | CAB87143 |
| 27 | AtGH3-15 | CAB87144 |
| 28 | AtGH3-16 | CAB87145 |
| 29 | AtGH3-18 | AAG60120 |
| 30 | AtGH3-19 | AAG60122 |
| 31 | AtGH3-7 | AAC00604 |
| 32 | AtGH3-8 | BAB08663 |
| 33 | OsGH3-1 | Q8LQM5 |
| 34 | OsGH3-10 | Q6ZLA7 |
| 35 | OsGH3-2 | BAF06259 |
| 36 | OsGH3-4 | AAU90225 |
| 37 | OsGH3-8 | Q0D4Z6 |
| 38 | OsGH3-9 | Q6ZLA3 |
| 39 | SbEER94671 | EER94671 |
| 40 | SbEER99639 | EER99639 |
| 41 | SbEES01517 | EES01517 |
| 42 | SbEES01578 | EES01578 |
| 43 | SbEES16535 | EES16535 |
| 44 | SbEES19769 | EES19769 |
| 45 | ZmACF88044 | ACF88044 |
| 46 | ZmACI46148 | ACI46148 |
| 47 | ZmACI46149 | ACI46149 |
| 48 | ZmACL52529 | ACL52529 |
| 49 | ZmACL54563 | ACL54563 |
| 50 | ZmACN32133 | ACN32133 |
| 51 | PpGH3-l | CAD42870 |
| 52 | PpGH3-2 | CAD42871 |
| 53 | SmXP_002990435 | XP_002990435 |
| 54 | SmXP_002987865 | XP_002987865 |
| 55 | SmXP_002987297 | XP_002987297 |
| 56 | SmXP_002983863 | XP_002983863 |
| 57 | SmXP_002983845 | XP_002983845 |
| 58 | SmXP_002973755 | XP_002973755 |
| 59 | SmXP_002985341 | XP_002985341 |
| 60 | SmXP_002987105 | XP_002987105 |
| 61 | SmXP_002987115 | XP_002987115 |
| 62 | SmXP_002981880 | XP_002981880 |
| 63 | SmXP_002994539 | XP_002994539 |
| 64 | SmXP_002988961 | XP_002988961 |
| 65 | SmXP_002986993 | XP_002986993 |
| 66 | SmXP_002986992 | XP_002986992 |
| 67 | SmXP_002990290 | XP_002990290 |
| 68 | AlGH3-1 | XP_002885948 |
| 69 | AlGH3-3 | XP_002880486 |
| 70 | AlGH3-4 | XP_002886679 |
| 71 | AlGH3-5 | XP_002869571 |
| 72 | AlGH3-6 | XP_002866046 |
| 73 | AlGH3-2 | XP_002868993 |
| 74 | AtGH3-1 | O82333 |
| 75 | AtGH3-2 | AEE86787 |
| 76 | AtGH3-3 | O22190 |
| 77 | AtGH3-4 | Q9LQ68 |
| 78 | AtGH3-5 | O81829 |
| 79 | AtGH3-6 | Q9LSQ4 |
| 80 | CcGH3 | AAS02074 |
| 81 | GmGH3 | CAA42636 |
| 82 | MtGH3 | ABN09059 |
| 83 | NtGH3 | AAD32141 |
| 84 | PiGH3-16 | CAJ14972 |
| 85 | PtGH3-1 | EEE70316 |
| 86 | PtGH3-2 | EEE87842 |
| 87 | PtGH3-3 | EEE85053 |
| 88 | PtGH3-4 | EEE95321 |
| 89 | PtGH3-5 | EEE97566 |
| 90 | PtGH3-6 | EEE95183 |
| 91 | RcGH3-3 | XP_002524947 |
| 92 | RcGH3-6 | XP_002533739 |
| 93 | ThBAJ34606 | BAJ34606 |
| 94 | VvGH3-1 | XP_002271252 |
| 95 | VvGH3-2 | XP_002283886 |
| 96 | VvGH3-3 | XP_002283229 |
| 97 | VvGH3-5 | XP_002276241 |
| 98 | AtGH3-10 | AAD14468 |
| 99 | AtGH3-11 | AAD23040 |
| 100 | OsGH3-3 | EEE54131 |
| 101 | OsGH3-5 | BAG92652 |
| 102 | OsGH3-12 | Q53P49 |
| 103 | PtGH3-10 | EEE95291 |
| 104 | PtGH3-13 | EEE98498 |
| 105 | RcGH3-5 | EEF28472 |
| 106 | SbEES00046 | EES00046 |
| 107 | SbEES02233 | EES02233 |
| 108 | SbEES18777 | EES18777 |
| 109 | VvGH3-7 | XP_002272560 |
| 110 | VvGH3-9 | XP_002280738.1 |
| 111 | ZmACN26159 | ACN26159 |
| 112 | SlGH3.1 | SL2.40ch01: 78555183-78557768 |
| 113 | SlGH3.8 | Solyc07g054580.2 |
| 114 | SlGH3.14 | SGN-E745758 |
| 115 | GmGH3.2 | XP_003521802.1 |
| 116 | GmGH3.6 | XP_003540891.1 |
| 117 | GmGH3.9 | XP_003518806.1 |
| 118 | GmGH3.10 | XP_003541929.1 |
| 119 | GmGH3.14 | XP_003516612.1 |
| 120 | GmGH3.15 | XP_003540050.1 |
| 121 | GmGH3.24 | XP_003550026.1 |
| 122 | Gm03g30590.1 | Glyma03g30590.1 |
| 123 | BjACC38383.1 | ACC38383.1 |
| 124 | Br040953 | Bra040953 |
| 125 | Br016359 | Bra016359 |
| 126 | Br008836 | Bra008836 |
| 127 | Br006196 | Bra006196 |
| 128 | Br023405 | Bra023405 |
| 129 | Br040812 | Bra040812 |
| 130 | Br029173 | Bra029173 |
| 131 | Br031718 | Bra031718 |
| 132 | Br019920 | Bra019920 |
| 133 | Br000087 | Bra000087 |
| 134 | Sm87623 | Selmo1\|87623 |
| 135 | Sm93250 | Selmo1\|93250 |
| 136 | Sm85812 | Selmo1\|85812 |
| 137 | Sm416246 | Selmo1\|416246 |
| 138 | Sm233086 | Selmo1\|233086 |
| 139 | Sm437924 | XP_002961596 |
| 140 | Os05g05180.2 | Os05g05180.2 |
| 141 | HvBAJ85306.1 | BAJ85306.1 |
| 142 | Bd1g18200.1 | XP_003559815 |
| 143 | Br036998 | Bra036998 |
| 144 | GmGH3.22 | XP_003524670.1 |
| 145 | GmGH3.25 | XP_003550991.1 |

TABLE 4
Relative amount of conjugation products produced from GH3 protein
reactions

| | | | Relative amount of conjugates produced | | | |
|---|---|---|---|---|---|---|
| | | | from protein reaction | | | |
| | SEQ | | 2,4-D- | 2,4-D- | Dicamba- | |
| Gene name | ID | Subgroup | Asp | Glu | Glu | Dicamba-Asp |
| AIGH3-9 | 1 | II | − | + | − | − |
| AIGH3-17 | 2 | II | ++ | +++ | − | − |
| AtGH3-17 | 3 | II | +++ | +++ | − | − |
| AtGH3-9 | 4 | II | − | + | − | − |
| OsGH3-7 | 5 | II | − | + | − | − |
| OsGH3-11 | 6 | II | − | + | − | − |
| OsGH3-13 | 7 | II | +++ | +++++ | − | − |
| PtGH3-7 | 8 | II | +++ | +++++ | − | − |
| PtGH3-8 | 9 | II | − | ++ | − | − |
| PtGH3-9 | 10 | II | + | ++ | − | − |
| RcGH3-17 | 11 | II | − | + | − | − |
| SbEES08587 | 12 | II | + | ++ | − | − |
| VvGH3-4 | 13 | II | − | + | − | − |
| VvGH3-6 | 14 | II | ++ | +++ | − | − |
| PtGH3-14 | 15 | I | − | + | − | − |
| VvGH3-8 | 16 | I | − | + | − | − |
| OsGH3-6 | 17 | I | − | − | − | − |
| AIGH3-14 | 19 | III | + | ++ | − | − |
| AlGH3-12 | 22 | III | + | + | − | − |
| AlGH3-7 | 23 | III | − | − | − | − |
| AtGH3-12 | 24 | III | + | + | − | − |
| AtGH3-13 | 25 | III | − | + | − | − |
| AtGH3-14 | 26 | III | + | ++ | − | − |
| AtGH3-15 | 27 | III | − | − | − | − |
| AtGH3-19 | 30 | III | + | + | − | − |
| AtGH3-7 | 31 | III | − | − | − | − |
| OsGH3-1 | 33 | II | +++ | ++ | − | − |
| OsGH3-10 | 34 | II | − | − | − | − |
| OsGH3-2 | 35 | II | ++++ | +++ | − | − |
| OsGH3-4 | 36 | II | +++ | + | − | − |
| OsGH3-8 | 37 | II | ++++ | ++ | − | − |
| SbEER99639 | 40 | II | ++++ | +++ | − | − |
| SbEES01517 | 41 | II | +++ | +++ | − | − |
| SbEES01578 | 42 | II | ++ | + | − | − |
| SbEES16535 | 43 | II | − | − | − | − |
| SbEES19769 | 44 | II | +++++ | +++++ | − | − |
| ZmACF88044 | 45 | II | − | + | − | − |
| ZmACI46148 | 46 | II | ++++ | +++ | − | − |
| ZmACI46149 | 47 | II | +++++ | +++ | − | − |
| ZmACL52529 | 48 | II | − | − | − | − |
| ZmACL54563 | 49 | II | +++ | +++ | − | − |
| ZmACN32133 | 50 | II | +++ | ++ | − | − |
| PpGH3-1 | 51 | I | + | + | − | − |
| PpGH3-2 | 52 | I | +++ | +++++ | + | − |
| SmXP_002983845 | 57 | I | + | + | − | − |
| SmXP_002973755 | 58 | II | +++ | +++ | − | − |
| SmXP_002981880 | 62 | I | ++ | +++ | − | − |
| SmXP_002986992 | 66 | I | − | + | − | − |
| AIGH3-1 | 68 | II | ++++ | +++ | − | − |
| AIGH3-3 | 69 | II | ++ | + | − | − |
| AIGH3-4 | 70 | II | + | + | − | − |
| AIGH3-5 | 71 | II | ++++ | +++ | − | − |
| AIGH3-6 | 72 | II | +++ | ++ | − | − |
| AIGH3-2 | 73 | II | ++++ | +++ | − | − |
| AtGH3-1 | 74 | II | +++ | ++ | − | − |
| AtGH3-2 | 75 | II | +++ | + | − | − |
| AtGH3-3 | 76 | II | − | − | − | − |
| AtGH3-4 | 77 | II | ++++ | +++ | − | − |
| AtGH3-5 | 78 | II | ++++ | +++ | − | − |
| AtGH3-6 | 79 | II | ++++ | +++ | − | − |
| CcGH3 | 80 | II | ++++ | +++ | − | − |
| GmGH3-21 | 81 | II | ++++++ | ++++++ | − | − |
| MtGH3 | 82 | II | +++ | + | − | − |
| NtGH3 | 83 | II | ++++ | +++ | − | − |
| PiGH3-16 | 84 | II | +++ | + | − | − |
| PtGH3-1 | 85 | II | +++++ | ++ | − | − |
| PtGH3-2 | 86 | II | +++ | ++ | − | − |
| PtGH3-3 | 87 | II | ++++ | +++ | − | − |
| PtGH3-4 | 88 | II | +++ | +++ | − | − |
| PtGH3-5 | 89 | II | +++++ | +++ | − | − |
| PtGH3-6 | 90 | II | +++++ | +++++ | − | − |
| RcGH3-3 | 91 | II | +++++ | ++++ | − | − |
| RcGH3-6 | 92 | II | +++++ | ++++ | − | − |
| ThBAJ34606 | 93 | II | +++++ | ++++ | − | − |
| VvGH3-1 | 94 | II | ++++ | +++ | − | − |
| VvGH3-2 | 95 | II | +++++ | +++ | − | − |
| VvGH3-3 | 96 | II | +++++ | ++++ | − | − |
| VvGH3-5 | 97 | II | ++++ | +++ | − | − |
| Cell only control | N/A | N/A | − | − | − | − |
| Buffer control | N/A | N/A | − | − | − | − |

TABLE 5
Conjugase enzymatic activity (k_{cat}) of 78 tested GH3 proteins.

| | | | Protein | Protein | | | |
|---|---|---|---|---|---|---|---|
| | SEQ | Sub- | Purity | Conc. | Protein | k_{cat} (hrs−1) | |
| Gene name | ID | group | (%) | (μg/mL) | MW | IAA-Asp | IAA-Glu |
| AIGH3-9 | 1 | II | 30 | 92.75 | 67.38 | 0.000 | 0.000 |
| AIGH3-17 | 2 | II | 90 | 163.75 | 69.88 | 33.508 | 317.690 |
| AtGH3-17 | 3 | II | 65 | 95.25 | 69.77 | 51.838 | 867.723 |
| AtGH3-9 | 4 | II | 60 | 61.25 | 67.06 | 0.000 | 0.000 |
| OsGH3-7 | 5 | II | 20 | 51.25 | 69.85 | 0.000 | 0.000 |
| OsGH3-11 | 6 | II | 20 | 59.5 | 67.64 | 0.000 | 0.000 |
| OsGH3-13 | 7 | II | 70 | 153.5 | 72.76 | 10.812 | 494.321 |
| PtGH3-7 | 8 | II | 85 | 157.75 | 69.44 | 38.668 | 450.548 |
| PtGH3-8 | 9 | II | 30 | 68 | 67.46 | 13.999 | 568.780 |
| PtGH3-9 | 10 | II | 50 | 89.75 | 68.34 | 4.487 | 21.980 |
| RcGH3-17 | 11 | II | 35 | 82 | 69.1 | 4.366 | 10.433 |
| SbEES08587 | 12 | II | 35 | 77.25 | 73.58 | 10.251 | 389.161 |
| VvGH3-4 | 13 | II | 35 | 83.25 | 68.54 | 3.873 | 16.309 |
| VvGH3-6 | 14 | II | 50 | 98.5 | 69.77 | 111.443 | 505.272 |
| PtGH3-14 | 15 | I | 20 | 61.75 | 65.51 | 0.000 | 0.000 |
| VvGH3-8 | 16 | I | 35 | 70.25 | 65.06 | 0.000 | 0.000 |
| OsGH3-6 | 17 | I | 30 | 82.5 | 53.92 | 0.000 | 0.000 |
| AIGH3-14 | 19 | III | 70 | 89.25 | 68.01 | 0.000 | 1.756 |
| AIGH3-12 | 22 | III | 90 | 84.25 | 65.92 | 0.000 | 12.925 |
| AIGH3-7 | 23 | III | 30 | 80.5 | 55.44 | 0.000 | 0.000 |
| AtGH3-12 | 24 | III | 95 | 86.75 | 66.03 | 0.000 | 10.015 |
| AtGH3-13 | 25 | III | 60 | 73.25 | 67.28 | 0.000 | 0.000 |
| AtGH3-14 | 26 | III | 60 | 73.5 | 67.85 | 0.000 | 0.000 |
| AtGH3-15 | 27 | III | 50 | 86.5 | 65.27 | 0.000 | 0.000 |
| AtGH3-19 | 30 | III | 50 | 73 | 65.03 | 0.000 | 3.177 |
| AtGH3-7 | 31 | III | 40 | 91 | 66.52 | 0.000 | 5.361 |
| OsGH3-1 | 33 | II | 90 | 64.25 | 68.27 | 633.605 | 33.412 |
| OsGH3-10 | 34 | II | 10 | 52 | 53.11 | 0.000 | 0.000 |
| OsGH3-2 | 35 | II | 90 | 94 | 68.81 | 664.242 | 42.295 |
| OsGH3-4 | 36 | II | 30 | 78.5 | 69.69 | 919.336 | 17.854 |
| OsGH3-8 | 37 | II | 50 | 95.25 | 67.76 | 578.598 | 28.361 |
| SbEER99639 | 40 | II | 90 | 77.25 | 69.03 | 651.991 | 31.110 |
| SbEES01517 | 41 | II | 90 | 73.75 | 68.99 | 855.770 | 80.034 |
| SbEES01578 | 42 | II | 15 | 58.5 | 68.04 | 4419.692 | 162.572 |
| SbEES16535 | 43 | II | 20 | 56 | 71.83 | 0.000 | 0.000 |
| SbEES19769 | 44 | II | 50 | 84.5 | 71.1 | 903.124 | 50.990 |
| ZmACF88044 | 45 | II | 15 | 54.5 | 59.29 | 0.000 | 0.000 |
| ZmACI46148 | 46 | II | 90 | 67 | 68.35 | 869.016 | 49.496 |
| ZmACI46149 | 47 | II | 90 | 84 | 67.75 | 684.072 | 26.467 |
| ZmACL52529 | 48 | II | 50 | 92.75 | 60.64 | 0.000 | 2.149 |
| ZmACL54563 | 49 | II | 30 | 66.5 | 69.82 | 522.629 | 26.015 |
| ZmACN32133 | 50 | II | 90 | 74.25 | 67.81 | 876.059 | 83.547 |
| PpGH3-1 | 51 | I | 90 | 79.5 | 71.96 | 0.000 | 0.000 |
| PpGH3-2 | 52 | I | 90 | 99 | 67.91 | 2.896 | 19.308 |
| SmXP_002983845 | 57 | I | 85 | 75.5 | 65.65 | 0.000 | 0.000 |
| SmXP_002973755 | 58 | II | 85 | 84.75 | 68.02 | 220.320 | 9.285 |
| SmXP_002981880 | 62 | I | 85 | 78 | 63.37 | 1.475 | 1.759 |
| SmXP_002986992 | 66 | I | 60 | 108 | 66.25 | 0.000 | 0.000 |
| AIGH3-1 | 68 | II | 90 | 110.75 | 67.68 | 436.828 | 14.961 |
| AIGH3-3 | 69 | II | 5 | 67.25 | 68.39 | 3315.262 | 71.865 |
| AIGH3-4 | 70 | II | 85 | 84 | 67.94 | 3.013 | 0.000 |
| AIGH3-5 | 71 | II | 85 | 106 | 70.29 | 429.073 | 24.704 |
| AIGH3-6 | 72 | II | 85 | 126.5 | 69.8 | 413.293 | 20.881 |
| AIGH3-2 | 73 | II | 90 | 80.75 | 69.14 | 583.500 | 13.953 |
| AtGH3-1 | 74 | II | 90 | 85.75 | 67.56 | 437.707 | 19.230 |
| AtGH3-2 | 75 | II | 85 | 83 | 68.99 | 511.761 | 30.640 |
| AtGH3-3 | 76 | II | 20 | 91.75 | 68.44 | 0.000 | 0.000 |
| AtGH3-4 | 77 | II | 95 | 81 | 67.88 | 414.602 | 37.932 |
| AtGH3-5 | 78 | II | 90 | 84 | 70.19 | 578.727 | 68.086 |
| AtGH3-6 | 79 | II | 95 | 86 | 69.8 | 447.107 | 14.154 |
| CcGH3 | 80 | II | 90 | 110.5 | 68.28 | 414.234 | 15.608 |
| GmGH3-21 | 81 | II | 70 | 80.75 | 67.8 | 1087.519 | 1075.524 |
| MtGH3 | 82 | II | 70 | 77.25 | 69.65 | 337.033 | 11.549 |
| NtGH3 | 83 | II | 90 | 69.75 | 68.51 | 716.658 | 34.341 |
| PiGH3-16 | 84 | II | 90 | 66.25 | 70.77 | 656.761 | 51.037 |
| PtGH3-1 | 85 | II | 90 | 73.5 | 68.5 | 900.907 | 39.695 |
| PtGH3-2 | 86 | II | 90 | 67.75 | 68.31 | 679.646 | 53.401 |
| PtGH3-3 | 87 | II | 90 | 52 | 68.61 | 806.314 | 44.225 |
| PtGH3-4 | 88 | II | 70 | 58.75 | 69.7 | 660.985 | 93.781 |
| PtGH3-5 | 89 | II | 95 | 54 | 69.97 | 941.117 | 160.490 |
| PtGH3-6 | 90 | II | 90 | 59.75 | 69.89 | 888.111 | 181.954 |
| RcGH3-3 | 91 | II | 85 | 71 | 68.35 | 887.172 | 36.015 |
| RcGH3-6 | 92 | II | 90 | 44.25 | 70 | 1037.037 | 183.972 |
| ThBAJ34606 | 93 | II | 85 | 72.25 | 70.25 | 610.082 | 67.109 |
| VvGH3-1 | 94 | II | 85 | 56 | 68.15 | 964.027 | 45.433 |
| VvGH3-2 | 95 | II | 85 | 52.75 | 68.35 | 1011.181 | 45.833 |
| VvGH3-3 | 96 | II | 80 | 47.75 | 70.32 | 1006.325 | 79.770 |
| VvGH3-5 | 97 | II | 80 | 61 | 69.93 | 759.486 | 47.289 |

Conjugase enzymatic activity (kcat) of 78 tested GH3 proteins (continued).

| | | | Protein | Protein | | k_{cat} (hrs−1) | |
|---|---|---|---|---|---|---|---|
| | SEQ | Sub- | Purity | Conc. | Protein | 2,4-D- | 2,4-D- |
| Gene name | ID | group | (%) | (μg/mL) | MW | Asp | Glu |
| AIGH3-9 | 1 | II | 30 | 92.75 | 67.38 | 0.000 | 0.015 |
| AIGH3-17 | 2 | II | 90 | 163.75 | 69.88 | 0.212 | 0.455 |
| AtGH3-17 | 3 | II | 65 | 95.25 | 69.77 | 0.424 | 0.988 |
| AtGH3-9 | 4 | II | 60 | 61.25 | 67.06 | 0.000 | 0.005 |
| OsGH3-7 | 5 | II | 20 | 51.25 | 69.85 | 0.000 | 0.028 |
| OsGH3-11 | 6 | II | 20 | 59.5 | 67.64 | 0.000 | 0.043 |
| OsGH3-13 | 7 | II | 70 | 153.5 | 72.76 | 0.639 | 5.237 |
| PtGH3-7 | 8 | II | 85 | 157.75 | 69.44 | 0.547 | 3.487 |
| PtGH3-8 | 9 | II | 30 | 68 | 67.46 | 0.000 | 0.559 |
| PtGH3-9 | 10 | II | 50 | 89.75 | 68.34 | 0.065 | 0.305 |
| RcGH3-17 | 11 | II | 35 | 82 | 69.1 | 0.000 | 0.027 |
| SbEES08587 | 12 | II | 35 | 77.25 | 73.58 | 0.044 | 0.554 |
| VvGH3-4 | 13 | II | 35 | 83.25 | 68.54 | 0.000 | 0.018 |
| VvGH3-6 | 14 | II | 50 | 98.5 | 69.77 | 0.385 | 1.204 |
| PtGH3-14 | 15 | I | 20 | 61.75 | 65.51 | 0.000 | 0.015 |
| VvGH3-8 | 16 | I | 35 | 70.25 | 65.06 | 0.000 | 0.028 |
| OsGH3-6 | 17 | I | 30 | 82.5 | 53.92 | 0.000 | 0.000 |
| AIGH3-14 | 19 | III | 70 | 89.25 | 68.01 | 0.140 | 0.322 |
| AIGH3-12 | 22 | III | 90 | 84.25 | 65.92 | 0.006 | 0.057 |
| AIGH3-7 | 23 | III | 30 | 80.5 | 55.44 | 0.000 | 0.000 |
| AtGH3-12 | 24 | III | 95 | 86.75 | 66.03 | 0.002 | 0.026 |
| AtGH3-13 | 25 | III | 60 | 73.25 | 67.28 | 0.000 | 0.018 |
| AtGH3-14 | 26 | III | 60 | 73.5 | 67.85 | 0.122 | 0.233 |
| AtGH3-15 | 27 | III | 50 | 86.5 | 65.27 | 0.000 | 0.000 |
| AtGH3-19 | 30 | III | 50 | 73 | 65.03 | 0.014 | 0.048 |
| AtGH3-7 | 31 | III | 40 | 91 | 66.52 | 0.000 | 0.000 |
| OsGH3-1 | 33 | II | 90 | 64.25 | 68.27 | 0.937 | 0.207 |
| OsGH3-10 | 34 | II | 10 | 52 | 53.11 | 0.000 | 0.000 |
| OsGH3-2 | 35 | II | 90 | 94 | 68.81 | 1.548 | 0.401 |
| OsGH3-4 | 36 | II | 30 | 78.5 | 69.69 | 2.002 | 0.254 |
| OsGH3-8 | 37 | II | 50 | 95.25 | 67.76 | 2.917 | 0.368 |
| SbEER99639 | 40 | II | 90 | 77.25 | 69.03 | 2.476 | 0.457 |
| SbEES01517 | 41 | II | 90 | 73.75 | 68.99 | 0.953 | 0.426 |
| SbEES01578 | 42 | II | 15 | 58.5 | 68.04 | 0.765 | 0.250 |
| SbEES16535 | 43 | II | 20 | 56 | 71.83 | 0.000 | 0.000 |
| SbEES19769 | 44 | II | 50 | 84.5 | 71.1 | 18.287 | 4.970 |
| ZmACF88044 | 45 | II | 15 | 54.5 | 59.29 | 0.000 | 0.033 |
| ZmACI46148 | 46 | II | 90 | 67 | 68.35 | 2.278 | 0.401 |
| ZmACI46149 | 47 | II | 90 | 84 | 67.75 | 2.892 | 0.355 |
| ZmACL52529 | 48 | II | 50 | 92.75 | 60.64 | 0.000 | 0.000 |
| ZmACL54563 | 49 | II | 30 | 66.5 | 69.82 | 3.255 | 0.993 |
| ZmACN32133 | 50 | II | 90 | 74.25 | 67.81 | 0.602 | 0.241 |
| PpGH3-1 | 51 | I | 90 | 79.5 | 71.96 | 0.078 | 0.122 |
| PpGH3-2 | 52 | I | 90 | 99 | 67.91 | 0.699 | 2.820 |
| SmXP_002983845 | 57 | I | 85 | 75.5 | 65.65 | 0.090 | 0.052 |
| SmXP_002973755 | 58 | II | 85 | 84.75 | 68.02 | 1.076 | 0.431 |
| SmXP_002981880 | 62 | I | 85 | 78 | 63.37 | 0.144 | 0.739 |
| SmXP_002986992 | 66 | I | 60 | 108 | 66.25 | 0.000 | 0.006 |
| AIGH3-1 | 68 | II | 90 | 110.75 | 67.68 | 2.057 | 0.525 |
| AIGH3-3 | 69 | II | 5 | 67.25 | 68.39 | 1.566 | 0.172 |
| AIGH3-4 | 70 | II | 85 | 84 | 67.94 | 0.040 | 0.006 |
| AIGH3-5 | 71 | II | 85 | 106 | 70.29 | 1.586 | 0.421 |
| AIGH3-6 | 72 | II | 85 | 126.5 | 69.8 | 1.300 | 0.211 |
| AIGH3-2 | 73 | II | 90 | 80.75 | 69.14 | 1.903 | 0.309 |
| AtGH3-1 | 74 | II | 90 | 85.75 | 67.56 | 1.188 | 0.136 |
| AtGH3-2 | 75 | II | 85 | 83 | 68.99 | 1.200 | 0.131 |
| AtGH3-3 | 76 | II | 20 | 91.75 | 68.44 | 0.000 | 0.000 |
| AtGH3-4 | 77 | II | 95 | 81 | 67.88 | 2.032 | 0.594 |
| AtGH3-5 | 78 | II | 90 | 84 | 70.19 | 2.309 | 0.795 |
| AtGH3-6 | 79 | II | 95 | 86 | 69.8 | 2.136 | 0.598 |
| CcGH3 | 80 | II | 90 | 110.5 | 68.28 | 2.517 | 0.577 |
| GmGH3-21 | 81 | II | 70 | 80.75 | 67.8 | 27.468 | 22.910 |
| MtGH3 | 82 | II | 70 | 77.25 | 69.65 | 1.494 | 0.122 |
| NtGH3 | 83 | II | 90 | 69.75 | 68.51 | 1.990 | 0.804 |
| PiGH3-16 | 84 | II | 90 | 66.25 | 70.77 | 0.379 | 0.089 |
| PtGH3-1 | 85 | II | 90 | 73.5 | 68.5 | 4.798 | 0.181 |
| PtGH3-2 | 86 | II | 90 | 67.75 | 68.31 | 0.934 | 0.203 |
| PtGH3-3 | 87 | II | 90 | 52 | 68.61 | 2.033 | 0.845 |
| PtGH3-4 | 88 | II | 70 | 58.75 | 69.7 | 0.740 | 0.536 |
| PtGH3-5 | 89 | II | 95 | 54 | 69.97 | 3.142 | 1.214 |
| PtGH3-6 | 90 | II | 90 | 59.75 | 69.89 | 5.415 | 2.816 |
| RcGH3-3 | 91 | II | 85 | 71 | 68.35 | 3.813 | 1.854 |
| RcGH3-6 | 92 | II | 90 | 44.25 | 70 | 4.189 | 2.525 |
| ThBAJ34606 | 93 | II | 85 | 72.25 | 70.25 | 4.232 | 1.750 |
| VvGH3-1 | 94 | II | 85 | 56 | 68.15 | 2.529 | 0.635 |
| VvGH3-2 | 95 | II | 85 | 52.75 | 68.35 | 5.691 | 1.113 |
| VvGH3-3 | 96 | II | 80 | 47.75 | 70.32 | 5.615 | 1.602 |
| VvGH3-5 | 97 | II | 80 | 61 | 69.93 | 2.603 | 0.974 |

Conjugase enzymatic activity (k_{cat}) of tested GH3 proteins (continued).

| | | | Protein | | |
|---|---|---|---|---|---|
| | SEQ | | purity | Protein conc. | k_{cat} (16 hrs⁻¹) |
| Gene name | ID | Subgroup | (%) | (μg/mL) | dicamba-Glu |
| PpGH3-2* | 52 | I | 90 | 983 | 0.024 |

*Data not available for dicamba-Glu conjugase activity with other genes.

TABLE 6
Conjugation activity of additional GH3 proteins.

| | | | Detected auxin conjugates | | | | | |
|---|---|---|---|---|---|---|---|---|
| | SEQ | Sub- | IAA- | IAA- | 2,4-D- | 2,4-D- | Dicamba- | Dicamba- |
| Gene name | ID | group | Asp | Glu | Asp | Glu | Asp | Glu |
| AtGH3-11 | 99 | I | No | No | No | No | No | No |
| OsGH3-3 | 100 | I | Yes | No | No | No | No | No |
| OsGH3-12 | 102 | I | No | No | No | No | No | No |
| PtGH3-10 | 103 | I | Yes | Yes | Yes | Yes | No | No |
| RcGH3-5 | 105 | I | Yes | No | No | No | No | No |
| VvGH3-7 | 109 | I | Yes | No | No | No | No | No |
| VvGH3-9 | 110 | I | No | No | No | No | No | No |
| ZmACN26159 | 111 | I | No | No | No | No | No | No |
| SlGH3-1 | 112 | I | Yes | No | No | No | No | No |
| SlGH3-8 | 113 | I | Yes | Yes | Yes | Yes | No | No |
| SlGH3-14 | 114 | I | No | No | No | No | No | No |
| GmGH3-2 | 115 | I | Yes | No | No | No | No | No |
| GmGH3-6 | 116 | I | Yes | Yes | No | No | No | No |
| GmGH3-10 | 118 | II | Yes | Yes | Yes | Yes | No | No |
| GmGH3-14 | 119 | II | No | No | No | No | No | No |
| GmGH3-15 | 120 | II | Yes | Yes | Yes | Yes | No | No |
| Gm03g30590.1 | 122 | I | Yes | No | Yes | Yes | No | No |
| BjACC38383.1 | 123 | III | Yes | No | No | No | No | No |
| Br040953 | 124 | II | Yes | Yes | Yes | Yes | No | No |
| Br016359 | 125 | III | Yes | No | Yes | No | No | No |
| Br008836 | 126 | III | Yes | Yes | Yes | Yes | No | No |
| Br040812 | 129 | III | Yes | Yes | Yes | Yes | No | No |
| Br029173 | 130 | III | Yes | Yes | Yes | Yes | No | No |
| Br031718 | 131 | III | No | No | No | No | No | No |
| Sm87623 | 134 | I | Yes | No | Yes | No | No | No |
| Sm93250 | 135 | I | Yes | No | No | No | No | No |
| Sm85812 | 136 | I | Yes | No | No | No | No | No |

### Example 5

### Transformation of Arabidopsis with GH3 Genes and Evaluation of Herbicide Response

[0212] Arabidopsis (Arabidopsis thaliana) expressing GH3 genes were produced using floral dip methods of Agrobacterium mediated transformation (Clough S J and Bent A F, 1998, Plant J. 16:735-43; Chung M. H., Chen M. K., Pan S. M. 2000. Transgenic Res. 9: 471-476; Weigel D. and Glazebrook J. 2006. In Planta Transformation of Arabidopsis. Cold Spring Harb. Protoc. 4668 3). Briefly, Arabidopsis (Col-0) plants were grown in soil in pots. The first inflorescence shoots were removed as soon as they emerged. Plants were ready for transformation when the secondary inflorescence shoots were about 3 inches tall. Agrobacterium carrying a suitable binary vector were cultured in 5 mL LB medium at 28° C. with shaking at 200 rpm for two days. 1 mL of the culture was then inoculated into 200 ml fresh LB media and incubated again with vigorous agitation for an additional 20-24 hours at 28° C. The Agrobacterium culture was then subjected to centrifugation at 6000 rpm in a GSA rotor (or equivalent) for 10 minutes. The pellet was resuspended in 20-100 mL of spraying medium containing 5% (wt/v) sucrose and 0.01-0.2% (v/v) Silwet L-77. The Agrobacterium suspension was transferred into a hand-held sprayer for spraying onto inflorescences of the transformation-ready Arabidopsis plants. The sprayed plants were covered with a humidity dome for 24 hours before the cover was removed for growth under normal growing conditions. Seeds were harvested. Screening of transformants was performed under sterile conditions. Surface sterilized seeds were placed onto MS-Agar plates (Phyto Technology labs Prod. No. M519) containing appropriate selective antibiotics (kanamycin 50 mg/L, hygromycin 20 mg/L, or bialaphos 10 mg/L). Anti-Agrobacteirum antibiotic timentin was also included in the media. Plates were cultured at 21° C. at 16 hr light for 7-14 days. Transgenic events harboring GH3 genes were germinated and transferred to soil pots in the greenhouse for evaluation of herbicide tolerance.

[0213] A selectable marker gene used to facilitate Arabidopsis transformation was a chimeric gene composed of the 35S promoter from Cauliflower Mosaic Virus (Odell et al. 1985. Nature 313:810-812), the bar gene from Streptomyces hygroscopicus (Thompson et al., 1987. EMBO J. 6:2519-2523), and the 3′UBQ14 terminator region from Arabidopsis (Callis et al., 1995. Genetics 139 (2), 921-939). Another visual selectable marker gene used to facilitate Arabidopsis transformation was a chimeric gene composed of the UBQ promoter from soybean (Xing et al., 2010. Plant Biotechnology Journal 8:772-782), the YFP coding sequence, and the 3′ region of the nopaline synthase gene from the T-DNA of the Ti plasmid of Agrobacterium tumefaciens. Bialophos was used as the selection agent during the transformation process. GH3 genes were expressed with a constitutive promoter, for example, the Arabidopsis UBQ10 promoter (Norris et al., 1993. Plant Mol Biol 21:895-906) or UBQ3 promoter (Norris et al., 1993. Plant Mol Biol 21:895-906) for strong or moderate expression, a GH3 coding sequence, and the 3′ terminator region of the French bean phaseolin gene (Sun et al., 1981. Nature 289:37-41; Slightom et al., 1983. Proc. Natl. Acad. Sci. U.S.A. 80 (7), 1897-1901)

[0214] Seeds of Arabidopsis ecotype Columbia (Col-0) and GH3 transgenic events were surface sterilized with 70% (v/v) ethanol for 5 minutes and 10% (v/v) bleach for 15 minutes. After being washed three times with distilled water, the seeds were incubated at 4° C. for 4 days. The seeds were then germinated on 1× Murashige and Skoog (MS) medium with a pH of 5.7, 3% (w/v) sucrose, and 0.8% (w/v) agar. After incubation for 3.5 days, the seedlings were transferred to the basal medium containing B5 vitamin, 3% (w/v) sucrose, 2.5 mm MES (pH 5.7), 1.2% (w/v) agar, and filter sterilized auxin herbicides 2,4-D or dicamba was added to the media at 60° C. The concentrations of 2,4-D were 0 μM, 0.1 μM, 0.5 μM, 0.7 μM, and 1.0 μM. The concentrations of dicmaba were 0 μM, 1.0 μM, 5.0 μM, 7.0 μM, and 10 μM. The basal medium contained 1/10×MS macronutrients (2.05 mm NH₄NO₃, 1.8 mm KNO₃, 0.3 mm CaCl₂, and 0.156 mm MgSO₄) and 1×MS micronutrients (100 μm H₃BO₃, 100 μm MnSO₄, 30 μm ZnSO₄, 5 μm KI, 1 μm Na₂MoO₄, 0.1 μm CuSO₄, 0.1 μm CoCl₂, 0.1 mm FeSO₄, and 0.1 mm Na₂EDTA). The seedlings were placed vertically, and the temperature maintained at 23° C. to allow root growth along the surface of the agar, with a photoperiod of 16 h of light and 8 h of dark.

[0215] After 6 days on media with various concentrations of 2,4-D or dicamba, the length of the primary root was measured. In wild type Arabidopsis, root growth inhibition is expected from auxin herbicide treatment. The length of the primary root in wild type plants is reduced with 2,4-D or dicamba treatment. The more 2,4-D or dicamba, the shorter the primary root. The difference in root growth inhibition between wild type and GH3 transgenic events is compared. Alleviation of root growth inhibition on 2,4-D or dicamba is an indication of auxin herbicide detoxification due to GH3 conjugation activity.

### Example 6

### Transformation of Soybean with GH3 Genes

[0216] Soybean plants expressing GH3 transgenes were produced using the method of particle gun bombardment (Klein et al. (1987) Nature 327:70-73, U.S. Pat. No. 4,945,050) using a DuPont Biolistic PDS1000/He instrument. GH3 transgenes include coding sequences of active 2,4-D or dicamba conjugases such as PtGH3-1 (SEQ ID NO:85), PtGH3-7 (SEQ ID NO:8), and RcGH3-6 (SEQ ID NO:92). A selectable marker gene used to facilitate soybean transformation was a chimeric gene composed of the 35S promoter from Cauliflower Mosaic Virus (Odell et al. (1985) Nature 313:810-812), the hygromycin phosphotransferase gene from plasmid pJR225 (from E coli; Gritz et al. (1983) Gene 25:179-188) and the 3′ region of the nopaline synthase gene from the T-DNA of the Ti plasmid of Agrobacterium tumefaciens. Another selectable marker used to facilitate soybean transformation was a chimeric gene composed of the S-adenosylmethionine synthase (SAMS) promoter (U.S. Pat. No. 7,741,537) from soybean, a highly resistant allele of ALS (U.S. Pat. Nos. 5,605,011, 5,378,824, 5,141,870, and 5,013,659), and the native soybean ALS terminator region. The selection agent used during the transformation process was either hygromycin or chlorsulfuron depending on the marker gene present. GH3 genes were expressed with a constitutive promoter, for example, the Arabidopsis UBQ10 promoter (Norris et al. (1993) Plant Mol Biol 21:895-906), a GH3 polypeptide, and the phaseolin gene terminator (Sun S M et al. (1981) Nature 289:37-41 and Slightom et al. (1983) Proc. Natl. Acad. Sci. U.S.A. 80 (7), 1897-1901). Bombardments were carried out with linear DNA fragments purified away from any bacterial vector DNA. The selectable marker gene cassette was in the same DNA fragment as the GH3 cassette. Bombarded soybean embryogenic suspension tissue was cultured for one week in the absence of selection agent, and then placed in liquid selection medium for 6 weeks. Putative transgenic suspension tissue was sampled for PCR analysis to determine the presence of the GH3 gene. Putative transgenic suspension culture tissue was maintained in selection medium for 3 weeks to obtain enough tissue for plant regeneration. Suspension tissue was matured for 4 weeks using standard procedures; matured somatic embryos were desiccated for 4-7 days and then placed on germination induction medium for 2-4 weeks. Germinated plantlets were transferred to soil in cell pack trays for 3 weeks for acclimatization. Plantlets were potted to 10-inch pots in the greenhouse for evaluation of herbicide resistance. Transgenic soybean, Arabidopsis and other species of plants could also be produced using Agrobacterium transformation using a variety of ex-plants.

### Example 7

### Herbicide Tolerance Evaluation of GH3 Transgenic Soybean Plants

[0217] T0 plants expressing GH3 transgenes are grown in a controlled environment (for example, 25° C., 70% humidity, 16 hr light) to either V2 or V8 growth stage and then sprayed with commercial 2,4-D or dicamba herbicide formulations at a rate up to 450 g/ha. Herbicide applications may be made with added 0.25% nonionic surfactant and 1% ammonium sulfate in a spray volume of 374 L/ha. Individual plants are compared to untreated plants of similar genetic background, evaluated for herbicide response at seven to twenty-one days after treatment and assigned a visual response score from 0 to 100% injury (0=no effect to 100=dead plant). Expression of the GH3 gene varies due to the genomic location in the unique T0 plants. Plants that do not express the transgenic GH3 gene are severely injured by 2,4-D or dicamba herbicide. T0 plants expressing introduced GH3 genes may show tolerance to the 2,4-D or dicamba herbicide due to activity of the GH3 protein.

[0218] Alternatively, evaluation of herbicide tolerance is performed through analysis of conjugation products. Seeds of GH3 transgenic soybean plants are surface sterilized and germinated on GB-5 basal media supplemented with 2,4-D or dicamba as described in Example 1. Ten days after germination, GH3 transgenic seeds are morphologically examined and compared with non-transgenic seeds. Non-transgenic seeds do not tolerate 2,4-D or dicamba in the media at concentration as low as 1 μM and thus do not germinate and grow well. Transgenic seeds with tolerance to 2,4-D or dicamba germinate and grow well with roots well-extended and true leaves emerged. Tissues of the germinated seeds are collected and ground using a mortar and pestle in extraction buffer containing 100 mM potassium phosphate (pH 7.0), 5 mM MgSO₄, and 1 mM DTT. Total extractions are subject to centrifugation at 14,000 rpm 4° C., for 30 min, supernatant is transferred and mixed with ice-cold methanol to reach a final concentration of methanol of 90%. The mixture is centrifuged again for 30 min at 14,000 rpm. Supernatant is then diluted in ddH₂O to reach final methanol concentration at 5% and subjected to LC-MS analysis. Higher level of 2,4-D-Glu or 2,4-D-Asp or dicamba-Glu or dicamba-Asp detected in samples prepared from GH3 transgenic tissue compared with that from non-transgenic tissue indicates more efficient detoxification of auxin herbicides into non-herbicidal Asp- or Glu-conjugates by transgenic GH3 enzymes in soybean plants.

[0219] Activity of soybean transgenic GH3 proteins are also evaluated using plant extracts. Tissues of GH3 transgenic plants treated are collected and ground in CCLR buffer containing 100 mM potassium phosphate (pH 7.8), 1 mM EDTA, 7 mM β-mercaptoethanol, 1% Triton, and 10% glycerol to obtain total protein extract. After centrifugation at 14,000 rpm at 4° C. for 30 min, the supernatant is transferred to conjugation reaction buffer containing 100 mM potassium phosphate (pH 7.0), 5 mM MgSO₄, 1 mM DTT, and 5 mM 2,4-D or dicamba. The reaction is carried out at room temperature and samples taken at various time points are mixed with ice-cold methanol to reach the final methanol concentration of 90%. The mixture is subject to centrifugation again for 30 min at 14,000 rpm. Supernatant is then diluted in ddH₂O to reach final methanol concentration of 5% and subjected to LC-MS analysis. Higher level of 2,4-D-Glu or 2,4-D-Asp or dicamba-Glu or dicamba-Asp detected in samples prepared from GH3 transgenic tissue compared with that from non-transgenic tissue indicates more efficient detoxification of auxin herbicides into non-herbicidal Asp- or Glu-conjugates by transgenic GH3 enzymes in soybean plants. The same protocols can be used with Arabidopsis and other plants expressing introduced GH3 gene variants.

### Example 8

### Example of 2,4-D Tolerance in Transgenic Arabidopsis Overexpressing GH3 Auxin Conjugating Enzyme

[0220] Transgenic Arabidopsis lines overexpressing SEQ ID NO:3 were generated and evaluated for 2,4-D herbicide response as described in Example 5. The Arabidopsis UBQ10 promoter was used to drive the expression of SEQ ID NO:3. Table 7 shows alleviation of root growth inhibition by 2,4-D in Arabidopsis T2 transgenic plants (8 plants; segregation in this generation yielded plants in this group which were homozygous and heterozygous) overexpressing SEQ ID NO:3. Root length of 8 plants per transgenic line was measured and the average was compared to untreated seedlings within the same genetic background. Root growth inhibition is expressed as percent reduction of root length in plants grown on 2,4-D. In wild-type Col-0 Arabidopsis, the primary root length was reduced to 77% when grown on 10 nM 2,4-D. Transgenic lines overexpressing SEQ ID NO:3 showed various degree of alleviation of root growth inhibition when grown on 10 nM 2,4-D, having smaller reduction in root length compared with wild-type (Table 7). In transgenic line #4, the inhibition of root growth by 2,4-D was completely alleviated at 10 nM 2,4-D.

TABLE 7
Inhibition of root growth by 2,4-D in wild-type
(Col-0) and transgenic Arabidopsis plants.

| Transgenic Lines | | | |
|---|---|---|---|
| Overexpressing | 2,4-D concentration | | |
| SEQ ID NO: 3 | 0 nM | 10 nM | 100 nM |
| Line #1 | 100* | 80 | 43 |
| Line #2 | 100 | 83 | 36 |
| Line #3 | 100 | 88 | 63 |
| Line #4 | 100 | 101 | 60 |
| Line #5 | 100 | 76 | 50 |
| Non transgenic | 100 | 77 | 58 |

*Percentage of the average root length of plants in the same genetic background when compared with 0 nM 2,4-D treatment.

[0221] Prospectively, the above techniques can be used to generate transgenic Arabidopsis and evaluated for 2,4-D herbicide, or alternatively dicamba, response as described in Example 5. For example, Arabidopsis UBQ10 promoter can be used to drive the expression of SEQ ID #26, #52, #57, #81, and #121. Alleviation of root growth inhibition by 2,4-D can be determined in Arabidopsis T2 transgenic plants (screening and selection for homozygous plants) overexpressing SEQ ID #26, #52, #57, and #81. Root length of 8 plants per transgenic line will be measured and the average can be compared to untreated seedlings within the same genetic background.

### Example 9

### Example of Soybean Seedling Response to Applied Auxin Conjugates

[0222] Conjugate forms of auxinic compounds when applied through spot infiltration, a needleless method to introduce exogenous agents into plant cells. Initially, various concentrations of analytical grade (98%+pure) IAA, 2,4-D, and dicamba were prepared as solutions that were applied directly to uni-foliate leaves of 9 day old soybean seedlings by spot infiltration in order to determine the range of auxinic response and severity.

[0223] Spot infiltration comprises applying a compound to be tested in composition that is applied to the surface of a plant, for example, to a leaf or other plant structure. For example, a method for testing a plant response to one or more compounds using spot infiltration comprises a) providing a composition comprising one or more compounds to be tested in a container having at least an opening for the compound enter and/or exit, and one or more elements for moving the composition into or out of the container; b) contacting at least one opening of the container with the surface of a plant and moving the composition comprising one or more compounds to at least the surface of the plant. A container and elements for moving the composition may comprise a syringe body and plunger. Moving the composition to the plant surface comprises contacting the surface with pressure sufficient for the composition to enter the cells of the plant. In an aspect, spot filtration testing comprises measuring an effect of the composition on the contacted plant and comparing that measure or effect to a plant that is not contacted with the composition.

[0224] Plant response phenotypes were documented at one day post-spot infiltration and subsequently every other day, up to nine days post treatment. Three concentrations were chosen based on reproducibility. In the studies described herein below, 5 replicate treatments for each conjugate form were conducted, along with appropriate negative controls. Data are summarized in Table 8 below.

[0225] Soybean plants spot infiltrated with IAA in 1% MeOH at concentrations of 1, 2.5 and 5 mM displayed modest stem twisting and bending (epinasty) at 1 day post treatment with increasing severity over the test range. No discernable phenotype was observed in seedlings treated with conjugate forms IAA-Asp, IAA-Glu or IAA-Phe at all test levels. Spot infiltration of IAA-Phe, dissolved in 50% EtOH, produced a necrotic lesion on leaf surface at point of application consistent with observation of 50% EtOH alone control.

[0226] Soybean plants spot infiltrated with dicamba in 5% EtOH at concentrations of 50, 100 and 250 μM reproducibly displayed epinasty at day 1 and leaf curling of 1^{st} tri-foliate, at all doses, within 2-4 days post treatment. Plants spot infiltrated with higher concentration of dicamba displayed more pronounced auxinic phenotype. Plants spot infiltrated with dicamba-Asp or dicamba-Glu showed phenotypes similar to that of negative control or plants infiltrated with 5% EtOH. No obvious auxinic phenotype was observed with these plants.

[0227] Soybean plants spot infiltrated with 2,4-D in 5% EtOH at concentrations of 100,250 & 500 μM displayed increased auxinic response ranging from mild to extreme epinasty respective of amount applied. Relative to dicamba, a much lesser extent of leaf curling at the first trifoliate was observed; however progressive chlorosis stemming from solution application points was displayed for all 2,4-D and conjugate forms. Such response was not observed in the negative control. Plants spot infiltrated with 2,4-D-Asp showed auxinic response nearly equivalent to that of 2,4-D, with similar extent of epinasty at the respective concentrations. Similarly, 2,4-D-Phe treated plants displayed similar degree of epinasty to that 2,4-D at respective levels. A distinctly lower level of severity was observed on plants spot infiltrated with 2,4-D-Glu, only at 500 μM did modest epinasty occur. Plants spot infiltrated with lower concentration of 2,4-D-Glu showed no discernible auxinic responses.

TABLE 8
Soybean seedling response to applied auxin conjugates.

| | | | | | | New |
|---|---|---|---|---|---|---|
| | | | | 1st | Chlorotic | growth |
| | | | Epinasty | trifoliate | lesion @ | recov- |
| Auxin | Conc. | | score | leaf curl | app. Pnt | ery |
| IAA | 1.0 | mM | + | 0 | 0 | + |
| IAA | 2.5 | mM | + | 0 | 0 | + |
| IAA | 5.0 | mM | ++ | 0 | 0 | + |
| IAA-Asp | 1.0 | mM | 0 | 0 | 0 | + |
| IAA-Asp | 2.5 | mM | 0 | 0 | 0 | + |
| IAA-Asp | 5.0 | mM | 0 | 0 | 0 | + |
| IAA-Glu | 1.0 | mM | 0 | 0 | 0 | + |
| IAA-Glu | 2.5 | mM | 0 | 0 | 0 | + |
| IAA-Glu | 5.0 | mM | 0 | 0 | 0 | + |
| IAA-Phe | 1.0 | mM | 0 | 0 | 0 | + |
| IAA-Phe | 2.5 | mM | 0 | 0 | 0 | + |
| IAA-Phe | 5.0 | mM | 0 | 0 | 0 | + |
| dicamba | 50 | μM | +++ | + | 0 | − |
| dicamba | 100 | μM | ++++ | + | 0 | − |
| dicamba | 250 | μM | +++++ | + | 0 | − |
| dicamba-Asp | 50 | μM | 0 | 0 | 0 | + |
| dicamba-Asp | 100 | μM | 0 | 0 | 0 | + |
| dicamba-Asp | 250 | μM | 0 | 0 | 0 | + |
| dicamba-Glu | 50 | μM | 0 | 0 | 0 | + |
| dicamba-Glu | 100 | μM | 0 | 0 | 0 | + |
| dicamba-Glu | 250 | μM | 0 | 0 | 0 | + |
| 2,4-D | 100 | μM | ++ | 0 | + | + |
| 2,4-D | 250 | μM | +++ | 0 | + | + |
| 2,4-D | 500 | μM | ++++ | 0 | + | + |
| 2,4-D-Asp | 100 | μM | ++ | 0 | + | + |
| 2,4-D-Asp | 250 | μM | +++ | 0 | + | + |
| 2,4-D-Asp | 500 | μM | ++++ | 0 | + | + |
| 2,4-D-Glu | 100 | μM | +/− | 0 | + | + |
| 2,4-D-Glu | 250 | μM | +/− | 0 | + | + |
| 2,4-D-Glu | 500 | μM | ++ | 0 | + | + |
| 2,4-D-Phe | 100 | μM | ++ | 0 | + | + |
| 2,4-D-Phe | 250 | μM | +++ | 0 | + | + |
| 2,4-D-Phe | 500 | μM | ++++ | 0 | + | + |
| H₂0 | | | 0 | 0 | 0 | control |
| 1% MeOH | | | 0 | 0 | 0 | control |
| 10% EtOH | | | 0 | 0 | 0 | control |
| 50% EtOH | | | 0 | 0 | + | control |

0 = no phenotype
+/− = threshold

### Example 10

### Example of Arabidopsis Response to Applied Auxin Conjugates

[0228] The effect of auxin conjugates was assessed using Arabidoposis (Arabidopsis thialiana) ecotype Col-0 plant. Prior to studies utilizing the auxin conjugates, levels of analytical grade (98%+pure) IAA, 2,4-D and dicamba in solution were applied at various concentrations directly to developmentally similar leaves of 20-23 day old Arabidopsis seedlings by needleless syringe spot infiltration methodology, in order to determine range of auxinic response and severity. Phenotypes were documented relative to control at 1 day post-spot infiltration and subsequently every other day, up to nine days post treatment. Three concentrations were chosen based on reproducibility, and conjugated forms were then studied with 4 or more replicate treatments for each, along with appropriate negative controls (H₂O and 10% EtOH).

[0229] IAA (dissolved in 5% EtOH) applied to (2) developmentally similar leaves of 21 day plants at concentrations of 1, 2.5 and 5 mM, display modest petiole twisting (epinasty) and leaf curl at 1-2 days post treatment at 5 mM (high dose). No discernable phenotype was observed in plants treated with conjugate forms IAA-Asp or IAA-Glu at all test levels.

[0230] Dicamba free acid (dissolved in 5% EtOH) applied at concentrations of 50, 100 and 250 μM reproducibly displayed petiole epinasty and leaf curling at day one, with the most pronounced severity at 250 μM. No obvious phenotype was observed with conjugated dicamba-Asp treatment performed at same time and levels; appearing equivalent to negative control. Dicamba-Glu displayed modest epinasty, compared to dicamba alone, at 100 and 250 μM levels.

[0231] 2,4-D (dissolved in 5% EtOH) applied by spot infiltration at concentrations of 50, 150, and 500 μM displayed increased auxinic response ranging from mild to more extreme epinasty relative to the concentration of 2,4-D applied. Both 2,4-D conjugates displayed similar response to 2,4-D at the respective concentration levels applied.

### Example 11

### Spot Infiltration Method

[0232] Examples 9 and 10 utilized a spot infiltration method for the delivery of an herbicide directly to leaves of a plant. The method generally allows for the directed delivery of a variety of agents to a localized area of a plant, e.g. localized region of leaves, for screening or assessment purposes, e.g. to quickly assess the response of a plant to the agent. As used in the foregoing examples, the spot infiltration method was used to introduce specific herbicides or specific conjugates of the herbicides to seedling plant leaves. Following introduction of the herbicide or the appropriate conjugate, plants were observed daily for nine days for characteristics of epinasty, trifoliate leaf curly, chlorosis, and new growth recovery.

[0233] Briefly, a solution of the desired agent is prepared of the desired agent, e.g. as described above in Example 10, solutions (5% EtOH) of 1, 2.5 and 5 mM IAA. The solution is then drawn into a 1 mL BD™ slip-tip syringe, bulk, non-sterile syringe (e.g. Becton, Dickinson and Company, Product No. 301025) with 100 μL markings. The desired volume is then applied to the leaf, e.g. as described in Examples 9 and 10, with the tip of the syring against the leaf and positive pressure applied to the syringe plunger. Sufficient pressure is applied in order to infuse the area beneath the syringe opening, but not so much pressure as to cause a visible-to-the-eye puncture or hole to form in the leaf. Some run-off of solution around the syringe opening is expected. In the foregoing examples, two spots were applied to each of two leaves per seedling for soybean plants. Typically, about four plants were thus treated for each concentration of agent tested. In soybean, both spots per leaf were at the distal portion of the leaf about 1-2 cm apart. When the method was applied to Arabidopsis, two developmentally intermediate aged leaves were chosen per plant, and one spot infiltration was carried out per leaf.

[0234] Generally, for Arabidopsis, the two leaves were chosen from opposite sides of rosette. In general, the spot infiltration method is carried out on younger plants in order to minimize experimental footprint and to maintain developmental uniformity. However, the method is not limited to use on young plants and can be easily applied to older plants as determined by the goals of a particular experiment.

[0235] As can be appreciated by one skilled in the art, the spot infiltration method as described herein can be utilized in the essential features for young and old plants, leaves of various sizes, and for a variety of agents of interest to screening on plants. The agents can include herbicides, insecticides, growth inducers, growth inhibitors, and the like. Volumes and the size of the spot infiltrated can be easily scaled to larger or smaller plants as the needs of the experiment require by utilizing larger or smaller commercially available syringes. In some circumstances, it may be useful to custom fabricate a syringe with a particular size opening or volume. A variety of vehicle solutions can be used for the agent of interest, so long as the vehicle is not directly deleterious to the outcome of the experiment. For example, aqueous solutions can be unmodified or comprise additional components such as short-chain alcohols (e.g. ethanol), ionic or nonic detergents, salts, or lipids. Such additional components can be added to enhance spot infiltration efficiency and/or to increase the solubility of the particular agent that is assessed.

[0236] The article “a” and “an” are used herein to refer to one or more than one (i.e., to at least one) of the grammatical object of the article. By way of example, “an element” means one or more element.

[0237] All publications and patent applications mentioned in the specification are indicative of the level of those skilled in the art to which this invention pertains. All publications and patent applications are herein incorporated by reference to the same extent as if each individual publication or patent application was specifically and individually indicated to be incorporated by reference.

[0238] Although the foregoing invention has been described in some detail by way of illustration and example for purposes of clarity of understanding, it will be obvious that certain changes and modifications may be practiced within the scope of the appended claims.

The application's sequence listing, which the Patent Office published only in electronic form, follows.

SEQUENCE LISTING (145 sequences)

SEQ ID NO: 1 - protein, 589 aa, Arabidopsis lyrata
MDVMKLDYNYKGGNALTELERITSKAAEVQDNILCGILERNKDTEYLSKYMKGSKDVVEFKRSVPIITYKDIYPYIQRIANGEDSSLITGHPITEILCSSGTSAGEPKLMPTISEDLDRRTFLYNLIIPIVNKYIPGLDKGKAMYLNFVKAETSTPCGLPIRAVLTSYYKSKHFQCRPYDPFNDLTSPIQTILCEDSNQSMYCQLLAGLIHRHKVMRLGAVFASAFLRAISYLEKKWSQLCEDIRTGRLNPMITDPGCQIAMSCLLTSPDPELASEIEEICSRSSWKGILCHLWPRAKFIEAVVTGSMAQYIPALEFFGQGKIPLVCPMYASSETYFGVNVEPLSKPSDVVFTLLPNMCYFEFIPLGKNGALSFDLDDDEQVPCDKVVDLVNVKLGRYYELVVTTFAGLYRYRIGDVLQVAGFYNEAPQFRFICRRNVVLSIDLDKTNEEDLHRSITLAKKKLGSNAFLAEYTSYADTSSVPGHYVLFWEIQGHLEPKLMEGCCVAVEEELDYIYRQCRTKERSIGALEIRVVKPGTFEKLMDLIISQGGSFNQYKTPRCVKSNSATFKLLNGHVTASFFSPRDPTWVA

SEQ ID NO: 2 - protein, 609 aa, Arabidopsis lyrata
MIPSYDPNDTEAGLKLLDDLTTNAETIQQQVLHQILSQNSGTQYLRAFLDGESDKNQQSFKNKVPVVNYDDIKPFIQRIADGESYDIVSAQPITELLTSSGTSAGKPKLMPSTAEELDRKTFFYSMLVPIMNKYVNGLDEGKGMYLLFIKPEIKTPSGLMARPVLTSYYKSQHFRNRPFNKYNVYTSPDQTILCQDSKQSMYCQLLCGLVQRSHVLRVGAVFASAFLRAVKFLEDHYKELCADIRTGTVTSWITNSSCRDSVLSILNGPNQELADEIESECAEKSWEGILRRIWPKAKYVEVIVTGSMAQYIPTLEFYSGGLPLVSTMYASSECYFGINLNPLCDPADVSYTLLPNMAYFEFLPVDDKSHEEIHFASHSNTDDDDDALKEDLIVDLVNVKVGQYYEIVITTFTGLYRYRVGDILKVTGFHNKAPQFRFVQRRNVVLSIDTDKTSEEDLLNAVTQAKLNHLQHPSSLLLMEYTSYADTSSIPGHYVLFWELKPRHSNDPPKLDDKTMDDCCSEVEDCLDYVYRRCRNRDKSIGPLEIRVVSLGTFDSLMDFCVSQGSSLNQYKTPRCVKSGGALEILDSRVIGRFFSKRVPQWEPLGLDS

SEQ ID NO: 3 - protein, 609 aa, Arabidopsis thaliana
MIPSYDPNDTEAGLKLLEDLTTNAEAIQQQVLHQILSQNSGTQYLRAFLDGEADKNQQSFKNKVPVVNYDDVKPFIQRIADGESSDIVSAQPITELLTSSGTSAGKPKLMPSTAEELERKTFFYSMLVPIMNKYVDGLDEGKGMYLLFIKPEIKTPSGLMARPVLTSYYKSQHFRNRPFNKYNVYTSPDQTILCQDSKQSMYCQLLCGLVQRSHVLRVGAVFASAFLRAVKFLEDHYKELCADIRTGTVTSWITDSSCRDSVLSILNGPNQELADEIESECAEKSWEGILRRIWPKAKYVEVIVTGSMAQYIPTLEFYSGGLPLVSTMYASSECYFGINLNPLCDPADVSYTLLPNMAYFEFLPVDDKSHEEIHFATHSNTDDDDDALKEDLIVNLVNVEVGQYYEIVITTFTGLYRYRVGDILKVTGFHNKAPQFRFVQRRNVVLSIDTDKTSEEDLLNAVTQAKLNHLQHPSSLLLTEYTSYADTSSIPGHYVLFWELKPRHSNDPPKLDDKTMEDCCSEVEDCLDYVYRRCRNRDKSIGPLEIRVVSLGTFDSLMDFCVSQGSSLNQYKTPRCVKSGGALEILDSRVIGRFFSKRVPQWEPLGLDS

SEQ ID NO: 4 - protein, 585 aa, Arabidopsis thaliana
MDVMKLDHDSVLKELERITSKAAEVQDNILRGILERNKDTEYLSKYMNGSKDVLEFKRAVPIIIYKDIYPYIQRIANGEDSSLITGHSITEILCSSGTSAGEPKLMPTIPEDLDRRTFLYNLIIPIVNKYITGLDKGKAMYLNFVKAETSTPCGLPIRAVLTSYYKSKHFQCRPYDPFNDLTSPIQTILCEDSNQSMYCQLLAGLIHRHKVMRLGAVFASAFLRAISYLEKKWSQLCEDIRTGSLNPMITDPGCQMAMSCLLMSPNPELASEIEEICGRSSWKGILCQLWPKAKFIEAVVTGSMAQYIPALEFFSQGKIPLVCPMYASSETYFGVNVEPLSKPSDVVFTLLPNMCYFEFIPLGKNGTLSFDLDDDEQVPCDKVVDLVNVKLGRYYELVVTTFAGLYRYRIGDVLQVAGFYNGAPQFRFICRRNVVLSIDLDKTNEEDLHRSITLAKKKLGSNAFLAEYTSYADTSSVPGHYVLFWEIQGHLEPKLMEECCVAVEEELDYIYRQCRTKERSIGALEIRVVKPGTFEKLMDLIISQGGSFNQYKTPRCVKSNSATFKLLNGHVMASFFSPRDPTWVP

SEQ ID NO: 5 - protein, 620 aa, Oryza sativa
MALLLPEFDPADVRAGRDLIHRLTADAAGIQRGVLREILSRNSGTEYLRRFLGGAAGDDDDVRDAFKRRVPVSGYEDVKPYVDRVASGGEPSSALLCSDPITCLSRSSGTSGGQQKLLPSTAEELDRKVFFYAVQALVRNMSLHTDHGEDDDGGGGEGMYLMFAFHGDRTLSGLPIQSALTTYYHSRQFQECDIGGFDKCTSPLEAILCPYGEQSMYCQLLCGLLHRCRVDRVGASFAAGLVRGIKFLENHWEEMCFNIRSGQLSDWITHTPLRDAVTGQYLQGSNPALADEIASECARKPWDGIVRRLWPRARYIRTIVTGSMSQYIPILEVYGGGLPLVSPIYASTECAAGINLRPLDPPSHVSYALLPNIAYFEFLEVMDENGEKVQGTTRLDDNLGEVKVVDLVDVKVGRCYELIVTTFAGLYRYRVGDLFTVSGFYNATPLFHFSGRHDVILSIDYEKISEEDLLNAIAETDKFHLRPLGYMLVGSTAYADISTLPGHYILFWELTNTCDSNVAIDIDQTAMEKCCLAVEDHFDEMYRKIRHRGSISALEIRILSHGAFDALMDFFVSRGTSASQYKTPTAIRSKEAMMVLEERVVGRFFSQATPSCRSAEFERR

SEQ ID NO: 6 - protein, 591 aa, Oryza sativa
MDDHNLDYKGSGALEELEMLTVNAKEAQELILTKILERNQATEYLSKFMNGSTNISAFKRHVPVVTYDKVHPYILRIATGEESSILCGEYILELLRSSGTSRGEPRLMPSILKDLDRRTYLYSLIMPIMNKYISGLGEGKAMYLLFVKAETLTDSGIPVRSVLTSYYKSPHFLHRKHDLYNNYTSPDEVILCPDSQQSMYCQLLCGLVERQHVLRIGAVFASAFLRSISFLEQHWRDLVNDIRIGQLNSSITSPACRLAMLNFLALPNPELADQVEAICSCGSWKGILGRLWPNVKYIEAVLTGTMAQYIPMLEFYGGGAIPFVCTMYASSESYFGVNLSPLCSPADVSYTILPNMAYFEFIPLEDGLRLTDHEEVIENDKLVSLVDVKVGCYYELVVTTFSGLYRYRVGDVLQVTGFYNRAPQFKFICRRNVILSIDSDKTNEEDLHNSVTTAKKILENQNYLLLEYTSYTDISTVPGHYVLFWEIKSTHDERPAPLDAQLLESCCAAVEESLDYVYRRCRAHDRSIGPLEIRLVEAGAFDALMDLLVSHGSSINQYKTPRCIESSLALKLLNSKVIACFFSPQDPECGM

SEQ ID NO: 7 - protein, 662 aa, Oryza sativa
MTSTSSENALDHDHDHDASSPAPATATAAALPPMIPACDPHDGPACLELIEVLTTRAAAVQRRVLAEVLAMNTGTDYLRRFLGDEVAAAAGGEDELAAAFKERVPVVEYEDVKPYIERIANGAPSSLISSKPITELLTSSGTSGGQPKLMPATEEELDRKTFLYNLLVPVMNKYVEGLDEGRGMYLLFVKPEITTASGMVARPVLTSYYKSRHFRRRPDSPYTRYTSPDAAILCPDSRQSMYAQLLCGLARRGEVLRVGAVFASAFLRAVKFLEGHWRALCADIRAGRADPAVVTDAACRGAVDAVLAARADPDLADAIAAECGGASWRGIVRRLWPRTKYIDVIVTGSMAQYIPLLEFYGGGLPLVSTMYASSESYFGINLRPLDPPEEVVYTLLPNMCYYEFIKVEKDGDGEKVRDGEVVDLVGVEVGAYYELVVTTFTGLYRYRVGDILQVAGFHNAAPQFRFVHRRNVVLSVDTDKTSEDDLLRAVTAAKPLLDPLSCVLAEYTAYADTSSIPGHYVLFWELTPSPSPPPPPCHDDANDAADIGEDKDKVAHVMAACCAAVEAGLDSVYRRCRSRDRSIGPLEIRVVAPGAFDALMDMCVSHGSSVNQYKTPRCIKHPDAIAVLEQRVVGRFFSDAVPHWEPLKVDGAAAAPATGSDQ

SEQ ID NO: 8 - protein, 606 aa, Populus trichocarpa
MLPVFDPNDNEAGLKLLEDLTNNACQIQQQVLEEILATNLHTEYLKSFLNGDSGKENFKNKVPIVNYEDIKPCIERIANGEPSSIISTQPITELLTSSGTSGGQPKIMPSTAEELERKTFFYNLLVPVMNKYVDGLDQGKAMYLLFIKPEISTPSGLMARPVLTSYYKSNNFRNRAFNRYNVYTSPDETILCSDSKQSMYCQLLCGLVQRDEVLRVGAIFASAFLRAIKFLEEYLKELCSNIRTGSVSDWITDPNCRNAVLSILSKPNSELADLIEDECSGKSWEGIIKKLWPRTKYIEVIVTGSMAQYIPTLEFYSGGLPLVSTMYGSSECYLGINFKPLSNPYDVSYTLLPNMAYFEFLPVDNNHKEVVPDVQCNGVSVTDRNGKEKVEAVDLVDVKLGHYYELIVTTFTGLYRYRVGDILMVTGFYNNAPQFRFVHRRNVVLSIDTDKTNEEDLLKAVTQAKVLLEPLGFLLTEYTSFADTASIPGHYVLFWELKMRGTNDLPELDPVIMEQCCSIVEESLDSVYRRCRKKDKSIGPLEVRVVTHGTFDALMDFCVSQGSSVNQYKTPRCIKSEEALKILDSRVVGRFSSNKTPFWEPFRIET

SEQ ID NO: 9 - protein, 587 aa, Populus trichocarpa
MLPIFDPNDNEAGLKLLEDLTNNACQIQRQVLEYILTTNLHTGYLKSFLNGDSSKENFKNKVPIVNYEDIKPCIERIANGEPSSIISAQPITELLTSSGTSGGQPKMMPSTAEELERKTFFYNLLMPIMNKYVDGLDQGKGMYLLFTKPEISTPSGLMARPVLTSYYKSSNFRNRAFNRYNVYTSPDETILCPDSKQSMYCQLLCGLVQREEVLRVGAVFASAFLRAIKFLEEYQKELCSNIRTGRLSDWITDPNCRNAVSSFLSKPNSELADLIEVECSGKSCEGIIKKLWPRTKYIEVIVTGSMAQYIPTLEFYSGGLPLVSTMYGSSECYLGINFKPLSNPSDVSYTLIPNMAYFEFLPVDKDNKKVIQAEKDVEAVDLEDVKLGHYYELVVTTFTGLYRYRVGDILMVTGFYNNAPQFRFVHRRNVVLSIDTDKTNEEDLLKAVTQAKVLLEPLGFLLTEYTSFADTSSIPGHYVLFWELKTQGTNDLPELDPITMEKCCSTVEESLDSIYRRCRKKDKSIGPLEIRVVTHGTFDALMDFCVSQGSSVNQYKTTRCIKSEEAFKILHSRVVGRFFSKKTPFWE

SEQ ID NO: 10 - protein, 596 aa, Populus trichocarpa
MDGKKLEYKGWVALKEIERLTEKADEVQETILKAILMQNGETEYLSKYMKGSKDVDEFKFHVPVITYKDVCPYIQRIATGEDSSLVTGHPVTEMLCSSGTSAGEPKLMPSIAEDLDRRTFVYNLIMPIMNQYIFGLDEGKAMFLYFIKAEMSTPCGLPARTVLTSYYKSKHFKCRTRDAFNDFTSPDQAILCKDSNQSMYCQLLSGLVHRHQVLRLGAVFASAFLRAISFLERNWGRLCNDIRSGDLDPTITDPECRSCMSMLLTSPNPSLADEIEDICSNTSWKGILCHLWPRAKYIEAVVTGSMAQYIPSLEYYSEGKLPLVCTMYASSECYFGVNLKPLCDPADVAFTLLPNMCYFEFIHLGENGTWLVNKDEEGEVPNDKLVNLVNVRLGSYYELVVTTFAGLYRYRIGDVLRVTGFHNKAPQFQFICRRNVVLSIDNDKTNEEDLHKSITAAKKLLEPYDALLVEYTSYADTSSVPGHYVLYWEILHDASFPDSSAQLDVKLLQECCISVEEELDYVYRRCRAHDKSVGPLEIRVVESGTFEALMDFFIGQGASINQYKTPRSIKSNAALKLLNSHVKASAFSPRDPAWIP

SEQ ID NO: 11 - protein, 597 aa, Ricinus communis
MDGKKLEYKGEAALEEIEKLTEKADEVQESILREILIQNGQTEYLSKYIKGSKDVKEFKYCVPVTTYKDMYPYIQRIANGEDSSLITGRPITEMLCSSGTSAGEPKLMPSINEDLDRRTFIYNLVMPIMNQYISGLDEGKAMYLYFVKEEMSTPCGLPARTVLTSYYKSKHFKCRARDSFNDFTSPDQAILCKDSDQSMYCQLLSGLVYRHQVLRIGAVFASALLRAISFLERNWVHLCNDIRNGELDPMITDPECRSCMSMILSSPNPSLADEIEEICSRPSWKGILCLLWPRTKYIEAVVTGSMAQYVPSLKYYSERKLPLVCTMYASSECYFGVNLKPLSDPAEVSFTLMPNMCYFEFIPLGENGTLLMDVDEEEKVPIHKLVDLVHVRRGCYYELVVTTFAGLYRYRIGDVLQVTGFHNQAPQFRFICRRNVVLSIDNDKTNEEDLHKSISTAKKLLEPYNAILVEYTSYAETLVVPGHYVLYWEILHHSSVVNHNQTPLDAEVFQECCIAVEEELDYIYRRCRTHDKSIGPLEIRVVEPGTFEALMDLFIGQGGSINQYKTPRCIKSNAALMLLNSHVKASFFSARDPVWIP

SEQ ID NO: 12 - protein, 668 aa, Sorghum bicolor
MSTSPAVLDHDHGHHRLLSSVSPPTTTTDSPATAMPPRAPSSLPPTIPACDPHDGPASLQLIEDLTTHAGAIQQRVLREILAMNAGTDYLRGFLGAGAEGRDADELAATFKDRVPVVEYEDVKPYIERIANGAPSSLISSKTITELLTSSGTSGGQPKLMPSTEEELDRKTFLYNLLVPVMNKYVEGLDKGRCMYLLFVKPEITTASGLVARPVLTSYYKSRHFRERPDSPYTRYTSPNEAILCPDSAQSMYAQLLCGLARRGEVLRVGAVFASAFLRAVKFLEAHWRALCDDIRAGRVDASRVTDAACRDAVARVVARPDPALADAIAAECEGSSSSSWRGIVRRLWPRTKYIDVIVTGSMAQYIPLLEFYGGGLPLVSTMYASSECYFGINLRPLDPPEDVAYTLLPNMCYYEFIKVEKDGEEAREDGKVVDLVDVEAGGYYELLVTTFTGLYRYRVGDILQVSGFHNAAPQFRFVHRRNVVLSVDTDKTSEDDLLRAVTAAKRLLAPLGGATILSEYTAYADTASIPGHYVLFWELTPTPPMPGDGDTAARVMAACCAEVEAGLDAVYQRCRSRDRSVGPLEIRVVSTGAFDALMDLCVSHGSSVNQYKTPRCIKHPDAIAVLEARVVGRFFSDTVPHWEPFNVVDTAAAGAAATTTPSLNEGAT

SEQ ID NO: 13 - protein, 596 aa, Vitis vinifera
MEGKRLEYRGEEALKELEKFTAKADEVQENILKEIIARNCETEYLKKYMGGSKDVLEFKQSVPVITYKDIHPYIQRIANGEDSSLISGHPITEMLCSSGTSGGEPKMMPSIAEDLNRRTFLYNLIMPIMNQYIPGLDEGKAMFLYFVKAEMSTPCGLPARAVLTSYYKSKNFRCRVRDAFNDFTSPDQAILCTDSNQSMYCQLLAGLVHRHQVLRLGAVFASALLRAISFLERHWVHLCNDIRTGHLDSSITDPECRSSMSTILSSPNPHLADEIEEICSHPSWKGMLSQLWPRAKYIEAVITGSMAQYIPSLEYYSGGKLPLVCTMYASSECYFGVNMKPLCDPADVAFTLLPNMCYFEFIPLGENGTLLMDMDEEKGVPKEKLVDLVHVRLGCYYELVVTTFAGLNRYRIGDVLQVTGFHNRAPQFRFICRRNVVLSIDNDKTNEEDLHRSITMAKKLLEPYNALLVEYTSYADTSSLPGHYVLYWEITHCISTDSPSTPLDSKVLEECCIAVEEELDYIYRRCRTHDKSVGPLEIRLVQPGTFEDLMDLFISQGGSINQYKTPRCIKSSNALKLLNSNVEASFFSPRDPRWIP

SEQ ID NO: 14 - protein, 607 aa, Vitis vinifera
MLLSCDPHDNEAGLMLLEDLTTNANQVQLEVLEEILTQNANTEYLRGYLDGHSDKGLFKKKVPIVNYEDIKPHIERIANGEPSRIISAQPITELLTSSGTSGGQPKLMPSTAEDLDRKTFFYNLLIPVMNKYVDGLDQGKGMYLLFIKPEISTPSGLMARPVLTSYYKSSNFRNRPFNPFNVYTSPDETILCLDSKQSMYCQLLCGLVQRDEVLRVGAVFASAFLRAIKFLEDHWRELCSNIRTGCVSDWITDPSCRNAVSSFLSKPQPDLADFIEFECNGESWEGIIKRLWPRTKYIEVIVTGSMAQYIPTLEFYSGGLPLVSTMYASSECYYGINLKPLSKPSDVSYTLLPNMAYFEFLPVQKNNGEVTQQVQCNGGCIKKEGERVEIEVVGLVDVKVGHYYELVVTTFTGLYRYRTGDILMVTGFYNNAPQFRFVQRRNVVLSIDTDKTNEEDLLKAVTQAKLLLEPYGFLLTEYTSYADTSSIPGHYVLFWELKTRGNNDLSEPDHTIMEQCCSTVEESLDSVYRRCRRRDNSIGPLEIRIVKPGTFDALMDFCVSQGSSVNQYKTPRCIKSKEAIKILDSRVVGKVFSKKVPFWEPFKMETK

SEQ ID NO: 15 - protein, 578 aa, Populus trichocarpa
MTYDELDRNLEDLTKNAAHHQLQTLHSILQHQASVGYLQPYLSACHAPVDAATFRSQVPLSSYDDYFHLINQLANGDIDHHQPLLSADPLLCFFYSSGTSTMKPKLIPYFDSALSKAASYNAHQGSAAIFRNLVPPRPEVNKILWFLYADDAPTTRGGFKVMAASTYPLQGNKSRSNWSQTLSCISPREVVFGSNIKQQMYCHLLCALRSFDIIDGIRAAYAAGLIRAFSLLESKWEKLCDDLESGFPSLEIGDAAMKESVVEFLGGPQVDLSRRIREICAESNWGGILSKLWPNVRYVKSVTTGSMKQYYSKLKYYAGDVMILGGDYFASECCLGINLDIQQPPESTRFVMLPTTAYFEFLPFDLNESSVVGEETVDFSGVKVGKMYEVAVTTYRGLYRYRLGDIVRVVGFHNSSPLVEFVMRAPKTGYEIITEKDLMSAMESFQHSMAAEVVEFASFSDFELSPKRLKVFIEFREGCDFLQEEKLQGSVEALQRCCSSLENGLGEIYKVQKDRGEIGPLLVSVVRSGSFDGILQMAIKNGAPAGQYKPPKIIRNREIVDFMEESAVLTISLDSFHG

SEQ ID NO: 16 - protein, 578 aa, Vitis vinifera
MADGEILKKLEDSTKDAVAVQLQTLHTILQRNGRSSYLQRYGASLDTGSFREAVPLSCYDDYADYIDRMADGGGGDDDGDRPLLSVDPLVCFFNSSGTSSMKPKLIPYFDSPPSKAASHIAHQGSVAILRRLFPPRQSINKVLWFLYAGNVTYTKGGFKAMAASAFPLQSNNKNPSPFLSTSASPREVILGSNVEQQMYCHILCGLRNLDFLDGIRAPYAVGLIRAFALLEFKWEQICEDLKCGFPSMEITDIAMRDSVTEVLAGPQLDLSKRIRTICEGKNWGGIVGKLWPNVRYIKCVCTGSMEQYYQKLKYYAGEIPVLGGDYFASECCVGINLDILQPPQLTRFVLLPTAAYFEFLPFTLDEEEIGDDAQETVDFSGVEVGKMYEIVVTTYRGFFRYRLGDVVRVVGFHNTSPEVEFVMRAPKTPAEILTERDLMTAMGNFQLVLRTVKMPDVTEFASFFDLDSIPKQLKIFLEVAGVLQDEKLQELGSVLRRNFSSLEDGLGGVYKLRKGRGEVGPLLVSIVKPGSFNRLLQMATENGAPASQYKPPKIIRNLEIVHFMEGSALLTVSFDSSD

SEQ ID NO: 17 - protein, 488 aa, Oryza sativa
MAATAWGIRSSGIRGASPVMSACVSPAEVILGADHQQQMYCHLLCGLRRWDAVDCIRAPYAAALARALRLLQSKWRQLCDDLECGTVCADVVTDAAMRGAVQDGVLAGPCPELAGRVRRICERDDWRGVLRQLWPDARYISCVTTGTMEQYFPAIKHFAGEALPVLGTDYLASECAIGINLERTSPPEETTYVLLPRAAYFEFIPFDMDAAGRGAAAAEPVDIAGVEAGKTYELVATTFRGLYRYKVGDVVKIAGFHHSSPRLQFVTRAPPPQEHGEVLTERDVMAAMDTFQLMLKDGGEVIEFAAFIIDGDGGQRRRRCATIAVEVSNGSKLLDHERSAAFLRRCTAPLEGCLGGAYRLSRATGDVAPLEVAVVRPGTFDRLAEAAIRGGAPANQYKPPRSSGTGTSSMCCNPPWCAAAAQSLNQLLTSICLIVSLNQRQFLDRESNSGTDKVFISDSILNFQHWGGFSLRFDLQEESLTLYKDHPS

SEQ ID NO: 18 - protein, 587 aa, Arabidopsis lyrata
MLPKFDLTDPKASLSLLEDVTTNVKQIQDSILEAVLSRNAHTEYLKGILNGQVDKQSFKKNVPVVTYEDIKPYIGRIANGEASDLICDRPISLFVMSSGTSGGIQNLIPLTTEEGEQRIFFGSLYRSLLYKYVEGIREGKALTFYFVNPESETRSGILVRTMITCILKSVNKTNSSLWDRLQISPHEISTCEDTTQSMYCQLLCGLLQRDNVARLGAPFASVFLRVIKFLEDHWQELCSNIRTGRLSDWITDAQCVSGIGKFLTAPNPDLASLIEQECSKPSWEAIVKRLWRKAKCVEAVVTGSMAQYIPLLEFYGGGLPLISSWYGSSECFIGVNVNPLCKPSDVSYTIIPSMGYFEFLEVKKDQKEAGRDPIENHVVVDLVDVKIGHDYEPVVTTFSGLYRYRVGDVLRVTGFYNNSPHFRFVGRQKVVLSLHMANTYEEDLLKAVSNAKLLLEPHDLMLMEFTSRVDSSSFVGHYVLYWELGSKVKDAKLEPNRDVMEECCFIVEESLDPLYRKERKKDKNIGPLEIKVVKPGAFDELMNFFLSRGSSVSQYKTLRSVTSEEAVKILEANVVSEFLSQKTPSWG

SEQ ID NO: 19 - protein, 595 aa, Arabidopsis lyrata
MLPKFDPTDQKACLSLLEDVTTNVKQIQDSVLEAILSRNARTEYLSGFLNGQVDKQSFKKNLPVVTYEDIRPYIDRIANGEPSDLICDRPISVLLTSSGTSGGVPKLIPLTTDELEQRISFASLYRPLLYKYVEGIRERKSFMLYFVTRESETASGILVRTMITCVLKSLKPSNSFIWDQTQISPHGISTCSDTTQSMYCQLLCGLLQRDNVGRLGAPFASSFLKIIKFLEDHWPEFCSNIRTGRLSDWITDPQCVSGIGKFLTAPDPELASLIEQECSQTSWEAIVKRLWPKAKCIEAIVTGTMAQYIPLLEFYSGGLPVISTFYGSSECFIGLNLNPLSKPSDVSYTIIPCMAYFEFLEVGKDYQETGHDPAEKPVVVDLVDVKIGHDYEPVVTTFAGLYRYRLGDVLRVTGFYNNAPQFHFVGRQKVVLSIDMDKTYEEDLLKAVTNAKLLLEPHDLMLMDFTSRVDSSSFPGHYVLYWELGSKVKDAKLELDPNVLEECCFTIEESLDAVYRKGRKNDKNIGPLEIKVVKSGAFEELMNLFLSRGSSVSQYKTPRSVTNEEAVKILESNVVSEFLSRKTPSWELHELYSNR

SEQ ID NO: 20 - protein, 583 aa, Arabidopsis lyrata
MSVLEDVTTNVNKIQDSVLEAILSRNAQTEYLRGFLNGQLDKQSFKKNLPIVTYEVIKPHIDRIANGEPSDLICDRHISLLLATTGTSGGIPKLIPLTAEELEQRILFGFLYAPLVFKHIEGLTQGKSLMFYFVTRESETASGLMVRFMITCVLKSVNPTNSFLWDRVQISPHAIAICEDTNQAMYCQLLCGLLQRENVARLGAPYASSFLKVIKFLEDHWHELCSNIRTGRLSDWITDAQCVSGISKFLTAPNPDLANLIEQECSKTSWEAILRRLWPKAKCIEAVITGTMAQYIPLLEFYGGGLPLVSSWYGSSECFIGINLNPLSKPSDVSYTIIPSMGYFEFIEVVKDRQEAGHVPADPVVVDLVDVKIGHDYELLVTTFSGKFLYRYRLGDVLRVTGFHNNAPQFYFVGRQKVVLSIDLSKTYEEDLLKAVKNASLLLEPHDLMLMDFTSRVDLSSLPGHYVLYWELGSKFKNAKLYPNSNVLEECCLTVEESLDSVYRKGRKNDKIIGPLEIKVVKPGAFDELMNFFLSRGSSVSQYKTPRSVTHEGALKILESKVAYKFLSRKSPSWELHELHSSR

SEQ ID NO: 21 - protein, 576 aa, Arabidopsis lyrata
MSLSVELKDLEVLTTNAKQIQDDVLKEILTLNANTEYVQRFLHGSSDKELFKKNIPVVSYGDVKPYIERVANGEPSDVISGEPITRFVQSSGTSGGIHKIFPVNDKYIEKLGYLVDVSSFITSKHFNDNVAEKGKKMAFLYNRLESKTPSGLPVSSSFTSYFMSDYFKNRPSKCNSEYTSPDQVIFCPDNNQSMYCHLLCGLSQREKVVGVSATFAHALVKALNALQIYWKELSSNIRSGHVSEWITDTNCRNSVSATLGGPDLELADMIERECSNNSWEGIITRLWPKAKFIECIVTGQMAQYIPTLEFYSNKLPIVSMIYGSSESIFGVNVDPLSKPQDVSYTFLPNISYFEFLPVDHEEDMNNIVDLVNVKLGCYYETVVTSYFGLHRYLVGDILQVTGFYNKTPQFRFVRRKNTVLSVNSEATTEEDILRGLARATLVLESSNSMLMGFTCYAYISTFPGHYVFYWELKAKDVNDVVELDEKVLAECCNALEESFGSLYKRLRSKDGSVGALEIRVVQQGTFDSLMEYFISKGCSSAQYKTPMCINSSEALAVLEDKVLARFYSEKSPPLDL

SEQ ID NO: 22 - protein, 574 aa, Arabidopsis lyrata
MKPISDINESFEKQLKYLTSDVKQIQDNLLEEIITPNTKTEYLQRFLIGRFDKDLFKKNVPIVTYEDIKPYLDRVVNGESSDVISARPITGFLLSSGTSGGAQKMMPWNNKYLDNLTFIYDLRMQVITKHVKGVEEGKGMMFLFTKQESMTPSGLPARVATSSYFKSDYFKHRPSNWYYSYTSPDEVILCPNNTQSLYCHLLCGLVQRDEVVRTGSIFASVMVRAIEVLKNSWEELCSNIRSGHLSNWVTDLGCQSSVSLVLGGPRPELADTIEEICNQKSWKGIVKRLWPNTKYIETVVTGSMGQYVPMLNYYCNDLPLVSTTYGSSETTFGINLDPLCKPEDVSYTFMPNMSYFEFIPMDGDNNDVVDLEDVKLGCTYEPVVTNFAGLYRMRVGDIVLVTGFYNNAPQFKFVRRENVVLSIDSDKTNEEDLFKAVSQAKLVLESSGLDLKDFTSYADTSTFPGHYVVYLEVDTKEGEEKKTAQFELDEEALSMCCLVMEESLDNVYKRCRFKDGSIGPLEIRVVRQGTFISLMDFFISQGASTGQYKTPRCIKSGKALQVLETCVVAKFFSS

SEQ ID NO: 23 - protein, 476 aa, Arabidopsis lyrata
VLEDLTSNVTQLQDNEILTLNANTNYLQSFFRGRFDKEIFKKNVPVVTYDDPSNVISAQPITGFVLSSGTSGGAQKMMPWNEKYLDSCMIFGCINVKNVEKGKAMMFYFTKLESITPSGLPARVASSSYLKSNYFKNRPSNWYYTYTSPDELTLCPDNKQNLYCHLLCGLVQRNEVTRMGSIFASVMKELWSNIRSGQLSEWITDIVANTIEKICNQKCWKGIVTRLWPKAKYIETIVTGSMVQYVPTLNYYSNDMLPLISTIYASSETQFGLNLNPMCKPEDVSYTFMPNVSYFEFIPVDGDKNNVVDLADVKLGCSYEAVVTNFRIRVGDILVVTGFHNKAPQFRFIRRDNVVLSIDLDKTNEDDLFKAVNRGKLTLDSSDLMLAMLISPLSRDKNKDKKSKKHIELKQETFSECCLLMEDSLDEVYKNCRFKEEWTFDSLMDFFISQGASIGQYKTPRCIKSAKALEVIEKMW

SEQ ID NO: 24 - protein, 575 aa, Arabidopsis thaliana
MKPIFDINETFEKQLKDLTSNVKSIQDNLLEEIITPNTKTEYLQRFLIDRFDKELFKKNVPIVSYEDIKPYLDRVVNGESSDVISARTITGFLLSSGTSGGAQKMMPWNNKYLDNLTFIYDLRMQVITKHVKGVEEGKGMMFLFTKQESMTPSGLPARVATSSYFKSDYFKNRPSNWYYSYTSPDEVILCPNNTESLYCHLLCGLVQRDEVVRTGSIFASVMVRAIEVLKNSWEELCSNIRSGHLSNWVTDLGCQNSVSLVLGGPRPELADTIEEICNQNSWKGIVKRLWPNTKYIETVVTGSMGQYVPMLNYYCNDLPLVSTTYGSSETTFGINLDPLCKPEDVSYTFMPNMSYFEFIPMDGGDKNDVVDLEDVKLGCTYEPVVTNFAGLYRMRVGDIVLVTGFYNNAPQFKFVRRENVVLSIDSDKTNEEDLFKAVSQAKLVLESSGLDLKDFTSYADTSTFPGHYVVYLEVDTKEGEEKETAQFELDEEALSTCCLVMEESLDNVYKRCRFKDGSIGPLEIRVVRQGTFDSLMDFFISQGASTGQYKTPRCIKSGKALQVLETCVVAKFFSI

SEQ ID NO: 25 - protein, 587 aa, Arabidopsis thaliana
MLPKFDLTDPKASLSLLEDVTTNVTQIQDSILEAVLSRNAHTEYLKGFLNGQVDKQTFKKNVPIVTYEDIKPYINRIANGEASDLICDRPISLLVMSSGTTAGIQNLIPLTTEDGEQRIMFGSLYRSLLYKYVEGIREGKSLTFYFVNPERETASGILIRTMITCILKSVNKTNSSLWDRLQISPHEISTCEDTTQSMYCQLLCGLLQRDNVARLGAPFASVFIRVIKYLEGHWQELCSNIRTGRLSDWITDPQCVSGISKFLTAPNPDLASLIEQECSKTSWEAIVKRLWPKAKCVEAVVTGSMAQYIPLLEFYGGGLPLISSWYGSSECFMGVNVNPLCKPSDVSYTIIPSMAYFEFLEVKKDQQEAGLDPIENHVVVDLVDVKIGHDYEPVVTTFSGLYRYRVGDLLRVTGFYNNSPHFRFVGRQKVVLSLHMANTYEEDLLKAVTNAKLLLEPHDLMLMEFTSRVDSSSFVGHYVLYWELGSKVKDAKLEPNRDVMEECCFTVEKYLDPLYRQERRKDKNIGPLEIKVVKPGAFDELMNFFLSRGSSVSQYKTPRSVKTEEAVKILEANVVSEFLSQETPPWG

SEQ ID NO: 26 - protein, 594 aa, Arabidopsis thaliana
MLPKFDPTDQKACLSLLEDVTTNVKQIQDSVLEAILSRNAHTEYLSGFLNGQADKKSFKKNVPVVTYEDIKPYIDRIANGEPSDLICDRPISVLLTSSGTSGGVPKLIPLTTEELEQRISFASLYRPLLYKYIEGIRERKSFMLYFVTRESETASGILVRTMITCVLKSVTPANSFIWDQSQISPHAITTCSDTTQSMYCQLLCGLLQRDNVGRLGAPFASSFLKIIKFLEDHWPEFCSNIRTGCLSDWITDPQCVSGIGKFLTAPNPELASLIEQECSQTSWEAIVKRLWPKAKCIEAIVTGTMAQYNPLLEFYSGGLPVISTFYGSSECFFGLNLNPLSKPNEVSYTIIPCMAYFEFLEVEKDYESGHDPAENPVVVDLVDVKIGHDYEPVVTTFAGLYRYRLGDVLRVTGFYNNAPQFHFVGRQKVVLSIDMDKTYDEDLLKAVTNASLLLEPHDLMLMDFTSRVDSSSYPGHYVLYWELGRKVKDAKLELDQNVLEECCFTIEESLDAVYRKGRKNDKNIGPLEIKVVKPGAFDKLMNFFLSRGSSVSQYKTPRSVTNEEALKILEANVVSEFLSQKTPSWELHELHSSR

SEQ ID NO: 27 - protein, 573 aa, Arabidopsis thaliana
MLPKFDPTNQKACLSLLEDLTTNVKQIQDSVLEAILSRNAQTEYLRGFLNGQVDKQNFKKNVPVVTYEDIRSYIDRIANGEPSDLICDRPISVLLTSSGTSGGVPKLIPLTTEDLEQRISFSSLYAPLLYKHIDGLSEGKSLIFYFVTRESKTANGDSLQVSPHAITTCADTTQSMYCQLLCGLLERDNVARLGAPFASSFLKVIKFLEDHWPELCSNIRTGRLSDWITDATCTSGIGKFLTAPNPELASLIEQECSKTSWEAILKRLWPKAKCIESIITGTMAQYIPLLEFYSGGLPLTSSFYGSSECFMGVNFNPLCKPSDVSYTIIPCMGYFEFLEVEKDHQEAGHDPTEKPVVVDLVDVKIGHDYEPVVTTFSGLYRYRVGDVLRATGFYNNAPHFCFVGRQKVVLSIDMDKTYEDDLLKAVTNAKLLLEPHDLMLMDFTSRVDSSSFPGHYVIYWELGSKVKDAKFEPNRDVMEECCFTVEESLDAVYRKGRKNDKNIGPLEIKVVKPGAFDELMNFFLSRGSSVSQYKTPRSVTNEEALKILEANVISEFLSRKIPSWELHELHSGR

SEQ ID NO: 28 - protein, 576 aa, Arabidopsis thaliana
MLPKFDPTNPLATMSVLEDVTTNVKKIQDSLLEAILSRNSQTEYLRGFLTGQLDKQSFKKNVPIVTYEDIKPHIDRIANGEPSDLICDRPISLLLATTGTSGGIPKLIPLTAEELEQRILFGFLYVPLVFKHIEGLTQGKSLMFYFVTRESETVSGLMVRDRVQISPHAIAICEDTNQGMYCQLLCGLLQREHVARLGAPYASSFLKVIKFLEDHWPELCSNIRTGRLSDWITDAQCVSGIGNFLTAPDPDLANLIEQECSKTSWEAILSRIWPKAKCIEAVITGTMAQYIPLLEFYGGGLPLVSSWYGSSECFIGINLNPLSKPSDVSYTIIPSMGYFEFIEVVKDRQEAGHVPADPVVVDLVDVKIGHDYELLVTTFSGLYRYRLGDVLRVTGFHNNAPQFYFVGRQNVVLSIDLSKTYEEDLLKAVKNASLLLEPHDLMLMDFTSRVDLSSLPGHYVLYWELGNKFKNAKLDPKSNVLEECCLTVEESLDSIYREGRKNDKIIGPLEIKVVKPGAFDELMNFFLSRGSSVSQYKTPRSVTHEEALNILESNVVSEFLSRKTPSWELHELHSSR

SEQ ID NO: 29 - protein, 525 aa, Arabidopsis thaliana
MMNPSLNLMDLEELTSNAKQIQEDVLEEILTLNANTEYLHRFLHGSSDKVLFKKNVPVVTYDDVKPYIERVANGEPSDVISGGPITMFLRSTGTSGGKQKVFPVNDKYIEKLGYVIALRSLAMSKHFDSGGEQGKAMEFHCTKPPSATPSGLPRDEVVRVGAAFAFVLVRAIDFLEKHWKELCSNIRSGHVSEWITDLEGRNAVSTILRGPDSILADVIEQECSHKSWEGIITRLWPKAKYIDCIITGQMSQYIPMLEFYSNKLPIVSTTYGSSESTFGMNVDPLCKPQDTSYTCAPNISYFEFLPVDHKGDMASIVDLVDVKLGCYYEPVVTNYFGLHRYLIGDILQVTGFYNNTPQFRFVHRKNVVLSVRSETTTEEDILKALNHVGLVLESSDLMLMGFTCYADISTFPGHYVFYWELKAKDVQDVFELEEKVMVKCCSLLEESFDEVYRKNRSKDECIGPLEIRVVQQGTFDSLMEYFISQGGSIAQYKTPICINSSEALAVLENKVLARFFSEKSPPLDS

SEQ ID NO: 30 - protein, 573 aa, Arabidopsis thaliana
MSLSVELKDLEVLTTNAKQIQDDVLKEILTLNANTEYLKRFLDGSSDKELFKKNVPVVSYNDVKPYIERVANGEPSDVISGGTITRFVQSTGTSGGIHKIFPVNDKYIENLGYLLAVSSLITSNDKVDEKGKKMAFLYNRLESKTPSGLALSSSFTSYFMSDYFKNRSSKCNSEYTSPDQVILCPDNNQSVYCHLLCGLSQREKVVGVSATFAHALIKAINALQIYWKELSSNIRSGHVSEWITDLDCKNAVSAILGGPDPELADVIEQECSHKSWEGIITRLWPKAKFIECIVTGQMAQYIPTLDFYSNKLPIVSMVYGSSESIFGVNVDPLSKPQDVSYTFLPNISYFEFLPIDHEEDMNTIVDLVGVKLGCYYETVVTSYFGLHRYLIGDILQVTGFYNNTPQFRFVRRKNIVLSVNSEATTEQDILKGLASATLVLESSNSMLTGFTCYADISSFPGHYVFYWELKAKDVDDVVELDENVLEECCYALEESFDALYKRLRSKEGSIGALEIKVVQQGTFDSLMEYFISKGGSVAQYKTPMCINSSETLAVLEDKVIARFYSQKSPPLNL

SEQ ID NO: 31 - protein, 578 aa, Arabidopsis thaliana
MSLTSDLSEKSSDKMKVLEDLTSNVTQIQDNVLEEILTLNANTNYLQKFFLGSFDKESFKKNVPVVTYEDVKPYIERVVNGEPSNVISARPITGFVLSTGTSGGAQKMMPWNEKYLDNLTFMYDLRMHIISNNVKDVEKGKAMMFYFTKLESITPSGLPARVASSSYLKSNYFKNRPSNWYYSYTSPDEVTLCPDNKQNLYCHLLCGLVQRNEVTRMGSIFASVMVRAIKFLEDSWEELCSNIRSGQLSEWITDIGCRDSVSLVLGGPHPEAADTIEQICNQKCWKGIITRLWPKAKYIETIVTGSMVQYVPTLNYYSNNMLPLISTIYASSETQFGLNLNPMCKPEDVSYTFMPNVSYFEFIPVDGDKNDVVDLADVKLGCCYEAVVTNFSGLYRIRVGDILVVTGFHNKAPQFRFIRRDNVVLSIDLDKTNEDDLFKAVNNAKLTLDSSHLMLIDFTSYADISTIPGHYVVYWEVKNKNEDKKSKKHIELKEETFSECCLLMEDSLDSVYKICRFKEESVGPLEIKVVRQGTFDSLMDYFISQGASIGQYKTPRCIKSGKALEVLEENVVATFFST

SEQ ID NO: 32 - protein, 581 aa, Arabidopsis thaliana
MSLCSDLTEKLDEEILEDLTSNVKQIQDNVLEEILTLNANTEYLRRFLHGSSSKELFKKNVPVVTYEDVKPFIDRVTNGEPSDIISGNPITGFLLSSGTSGGKQKMFPRNNKYLENIKFIFYYRSLVISKHIDGLEHGKGMVFNFCTSENTTPSGLPSSAASTSFFKSDYFKNRPSYWHWSYTSPDEVILCSDTKQTLYCHLLCGLVQRDDVVKVGAAFVTILVRAINLLENSWKEICTNIRFGHLSEWITDISCRDSVSKILGEPNPELADLIENECNNKSWEGIVPRLWPKAKFIECIATGQMAQHIPTLEFYSNKLPSISSSYVSSETMFGINMSPLCKPENVSYTFLPNLSYFEFLLVDAGDKTEIVDLVDVKLGCYYEPLVTNHSGLHRYKMGDILLVTGFYNNAPQFRFVRRGNLTLSIHLEITTDEDLLNAVTDAKMVLESSNLMLMDFTSYADISTTPGHYVLYWELKAKYRNDIVEIDKNVLVECCYVVEESLNNSYRVYRSKGGLIGALEIRLVQQGTFDALMEFFITQGASSTQYKTPICIKSTEALVILEENVHACFFTDKSLSLNFSS

SEQ ID NO: 33 - protein, 610 aa, Oryza sativa
MPEAPTAKTAPAYGYAPGAHAEALEFIEHVTANAGQVQRRVLGEILAQNAPAEYLRRYGIPGSPDVVDAFRRLVPLVTYEGLQPDILRIANGDTSPIFSGKPISEFLTSSGTSGGERKLMPTIADEMNRRSLLYSLLMPVMSQSVSGLDKGKAMYLLFVKAESRTPGGLAARPVLTSYYRSRQFLDRPRDPYTSYTSPDEAILCVDSYQSMYAQLLCGLVHRADVLRVGAVFASGFLRAIHFLEKHWARLCHDIRTGELDPEITDRVVRDAVGRVLRADPALADAIEDECARASWEGIIRRLWPRTKYIDVIVTGTMSQYIPTLEFYGGGLPLTCTMYASSECYFGLNLNPMCKPSDVAYTLIPTMCYYEFLPVNCNNATAEASHRDLVDLVDVKLGHEYELVVTTYSGLYRYRVGDVLRVAGFKNKAPMFSFVRRQNVALSVDSDKTDETELHAAVSGAVQHLAPFGASLVEYTSYADAATIPGHYVLFWELRAGSTAVPASVFEECCLSVEEALNSVYRQGRACDRSIGPLEIRVVAEGTFDKLMDYAISRGASINQYKAPRCVRPGPVVELLDARVQGKYFSPKCPKWSPGNKQWNKSKDLVGKGDA

SEQ ID NO: 34 - protein, 478 aa, Oryza sativa
MAAKGISTIGAASRSLSSSLMAAAKEPDVENLRLIEELTSNVDAVQERVLAEILGRNADAEYLDKCGLDASDTDRATFRAKVPVASYDDLKPYVKRIANGDRSPILSTHPIIEFFTSSGTSAGERKLMPIVTDEMARREVLSSLATSVLNVYVPGLHTGKGLYFLFARSETKTPGGLTAQPALTSVYKSEHFKRAYAYTSPMAAILCEDASQSMYAQMLCGLCQRHDVLRVGAVFAAALVRAIRFLQLNWAQLAADIETGELNPRVTDPSDRECSRGDWTGIVTRLWPKTKCLNVVVTGVMAQYIPTLQYYSGGLPIVSGMYASSECFFGLNLRPLCGPSEVSYTIMPNTAYFEFLPVGEAVDASNLVELARVEDGREYEVVVTTYAGLNRYRVGDVLCVTGFHNAAPQFRFVRRQSVLLSIEADKTDEAELQRAVERASSALLRPRGASIVEYTSRACTERVPGHFSPALPHWTLAP

SEQ ID NO: 35 - protein, 614 aa, Oryza sativa
MAPAAVAAAEAGSKAAAVAGKAVAACERDAEKLEFIEEMTRGFDAVQERVLAAILARNNGAEYLRRHGMEGRTDREAFKARVPVVTYEDLRPEIERIANGDRSNIISSHPITEFLTSSGTSAGERKLMPTIEDELDRRQMLYSLLMPVMNLYVPGLDKGKGLYFLFIKSETKTPGGLPARPVLTSYYKSDHFKHRPFDPYNVYTSPTAAILCTDAFQSMYAQMLCGLVARAEVLRVGAVFASGLLRAIRFLQLHWRELAHDIRTGTLSAKVTEPSIRDAVAEVLAAPDAELAAFVEAECGKDKWEGIITRMWPNTKYLDVIVTGAMAQYIPTLKFYSGGLPMACTMYASSECYFGLNLRPMCDPSEVSYTIMPNMGYFELMPHDPDAPPLPRDAPPPRLVDLADAEVGREYELVITTYAGLCRYRVGDILQVTGFHNAAPQFRFVRRKNVLLSIDSDKTDEAELQAAVERASALLSPYGASIVEYTSQADATTIPGHYVVYWELMVREGGAWPPPAEEEGRGVFERCCLEMEEALNAVYRQGRNGEAIGPLEIRVVRAGTFEEVMDYAISRGASINQYKAPRCVSFGPIIELLNSRVISKHFSPACPKYSPHKK

SEQ ID NO: 36 - protein, 629 aa, Oryza sativa
MPEAVAAAVSPAAAAATAMCAEHREKLEHIERVTRNAGQEQRRVLEEILAQNAQAEYLRRLGVPGDAPGADEAFRRLAPLVTYEDILPDVLRIANGDTSPILSGKPVSEFLTSSGTSGGERKLMPTIEEEMERRSGLYSLLMPVMSRQVPGLDKGKAMYLYFVKSEWRTPGGLPARPVLTSFYRSRYFLERPHDPYTVYTSPDEAVLCEDAYQSMYAQLICGLVHRADVLRVGAVFASGFLRAIRFLEKHWPSLCRDIRAGELDGGVTDPAVRGAVGRVLRGADPALADAIEAECARPSWQGIIRRVWPSTKYIDVIVTGAMAQYIPTLEFYGGGLPLACTMYASSECYFGLNLNPMCKPSEVAYTLIPTMCYFEFLPVNSGANDVAAPEPDHRGLVDLVDVKLGHEYELVVTTYSGLYRYRVGDVLRVAGFKNAAPMFAFVRRKNVALSIDSDKTDEAELHAAVTEAVQHLAPFGASLVEYTSYADTATTIPGHYVLFWELRSPAGGTPVPASVFEDCCLAVEEGLNSVYRQCRAADRSIGPLEIRVVADGTFDKLMDYALSRGASINQYKAPRCVRPGPVVELLDGRVQATYFSPKCPKWCAGGNKQWISSGAAAKKTTTTCDSLAV

SEQ ID NO: 37 - protein, 605 aa, Oryza sativa
MAVMTDVSTTGTALRTPAAGAVKEGDVEKLRFIDEMTTNVDAVQERVLGEILGRNAGTEYLTKCGLDGATDRAAFRAKVPVVSYDDLQPYIQRIANGDRSPILSTHPVSEFLTSSGTSAGERKLMPTIMDELDRRQLLYSLLMPVMNLYVPGLDKGKGLYFLFVKSETKTPGGLTARPVLTSYYKSDHFKNRPYDPYHNYTSPTAAILCADAFQSMYAQMVCGLCQRNDVLRLGAVFASGLLRAIRFLQLNWEQLADDIESGELTPRVTDPSVREAVAAILLPDPELAKLIRAECSKGDWAGIITRVWPNTKYLDVIVTGAMAQYIPTLEFYSGGLPMACTMYASSECYFGLNLRPMCDPSEVSYTIMPNMGYFEFLPVDETGAASGDATQLVDLARVEVGREYELVITTYAGLNRYRVGDVLRVTGFHNAAPQFRFVRRKNVLLSIESDKTDEAELQRAVERASALLRPHGASVVEYTSQACTKRIPGHYVIYWELLTKGAGATVVDADTLGRCCLEMEEALNTVYRQSRVADGSIGPLEIRVVRPGTFEELMDYAISRGASINQYKVPRCVTFPPIVELLDSRVVSSHFSPALPHWTPARRSE

SEQ ID NO: 38 - protein, 441 aa, Oryza sativa
MFVKSETKTRGGLTAWFALTSVYKSEQFKSMAIAYTSPTAAILCEDAFQSMYAQMVCGLCQRHDVVRFGAVFAAALVRAIRFLQLNWGQLAADIEAGELGPHVADPSVREAVSGILRSDAELAEFVRIECSKGDWAGIITRIWPNTKYVDAIVTGAMAQYIRTLQYYSGGLPIVSTSYASSECFFGINLRPVCDPSEVSYTIMPNTAYFEFLPVGEVVDATNLVDLARVEVGREYEVVITTYAGLSRYRVGDVLRVTGFHNAAPQFRFVRRQSVLLSVELDKTDEAELHRAVERASSALLRPRGVSVAEYTSRACTERIPGHYVVYWELLTESPVGAGDGDTVDGETLGRCCLEMEEALSAVYRQGRVADGSIGPLEIRIVRPGTFEEVMDLAVSRGTSIGQYKVPQCVTVPSVVELLDSRVVSSQFSPALPHWIPTPRSD

SEQ ID NO: 39 - protein, 623 aa, Sorghum bicolor
MAVMTDMPAATALRAPPVPAAAGSDKDVEKLRFIEEMTSDVDAVQERVLAEILARNARTEYLARCGLAGATGRDAFRARVPVVTYEDLQPDIQRIANGDRSPILSAHPISEFLTSSGTSAGERKLMPTIKEELDRRQLLYSLLMPVMNQYVPGLDKGKALYFLFVKSETTTPGGLTARPVLTSYYKSEHFKNRPFDPYHDYTSPTAAILCADAFQSMYAQMLCGLCQRHDVLRVGAVFASGLLRAIRFLQLHWEQLADDIGSGSLNPRVADPSVRDAVADILRRPDPDLARFVRAECSRGDWAGIVTRVWPNTRYLDVIVTGAMQQYIPTLQYYSGGLPMACTMYASSECYFGLNLRPMCRPEEVCYTIMPNMGYFEFLPVDEASGVPAASGDAAARQLVDLAGVEQGREYELVITTYAGLYRYRVGDILRVAGFHNAAPQFRFVRRKNVLLSIESDKTDEAELQRAVDRASALLRERGGGGGAAVAEYTSHACTRSIPGHYVIYWELLATTAGGAVAGGDVLERCCLEMEEALNSVYRQSRVADGSIGPLEIRVVRPGTFEELMDYAISRGASINQYKVPRCVSFPPIVELLDSRVVSRHFSPSPPHWAPAAAPARRSSGSG

SEQ ID NO: 40 - protein, 619 aa, Sorghum bicolor
MAVMAEVVSTTGAALRSPASQPPPPPAAAAVKDADAEKLQFIEEMTSNVDAVQERVLGEILARNADTEYLAKYGITGASDRATFRAKVPMATYEDLQPYIRRIADGDRSPILSGHPVSEFLTSSGTSAGERKLMPTIEDELNRRQLLYSLQMPVMNLYVPGMDKGKALHFLFVKSETKTPGGLAARPVLTSYYKSNHFKNRPFDAYNNYTSPTAAILCADAFQSMYAQMVCGLCQRQDVLRVGAVFASGLLRAIRFLQLNWEQLADDIESGSLTPRITDPSVREAVAGILRPDPELASLVRSECSKGDWAGIITRIWPNTKYLDVIVTGAMAQYIPTLKYYSGGLPMACTMYASSECYFGLNLRPMCDPSEVSYTLMPNMCYFEFLPMDAAASGGGDASQLVDLARVEVGREYELVITTYAGLNRYRVGDVLQVTGFHNTAPQFRFVRRKNVLLSIESDKTDEAELQRAVERASALLRPHGAAVVEYTSQAYTKSIPGHYVIYWELLTKGPAAGAGAAVDRETLDRCCLEMEEALNTVYRQSRVADGSIGPLEIRVVRPGTFEELMDYAISRGASINQYKVPRCVTFPPIIELLDSRVVSTHFSPALPHWTPGQRSHSD

SEQ ID NO: 41 - protein, 613 aa, Sorghum bicolor
MAPMATAAAAAAVGRVTALGVAACERDVEKLEFIEDKTKNFDAEQVRVLAEILARNNGAEYLRRHGMEGRTDRQAFKARVPVVTYEDLRPEIDRIANGDRSNIISSHPITEFLTSSGTSAGERKLMPTIEDELNRRQMLYSLLMPVMNLYVPGLDKGKGLYFLFIKSETKTPGGLPARPVLTSYYKSDHFKHRPYDPYNVYTSPTAAILCTDSFQSMYSQMLCGLVARTEVLRVGAVFASGLLRAIRFLQLHWKELAHDLRTGTLSARVVEPSIRDAVAEVLTKPDAGLADLVEAECGKDNWEGIITRVWPNTKYLDVIVTGAMAQYIPTLKYYSGGLPMACTMYASSECYFGLNLRPMCDPSEVSYTIMPNMGYFELLPHDPEDKPAVSSSSAASAMDHDRLLVDLADAEVGKEYELVITTYAGLCRYRVGDILHVTGFHNAAPQFRFVRRKNVLLSIDSDKTDEAELQSAVERASRLLAPYDARIVEYTSQADATTIPGHYVVYWELMVRDGGASPEPDVFERCCLEMEEALNAVYRQGRNGDAIGPLEIRVVRGGTFEEVMDYAISRGASINQYKAPRCVSFGPIIELLNSRVVSRHFSPACPTYSPHKK

SEQ ID NO: 42 - protein, 610 aa, Sorghum bicolor
MPEAPTTKTTLPAGGFGPGAHREALEFIEHVTANAGKVQRRVLAEILTQNAPAEYLRRYGVPGGSADAVEAFRRVVPLVTYEGLQPDILRIASGDTSPILSGKPISEFLTSSGTSGGERKLMPTIADELDRRSLLYSLQMPVMSQSVPGLDKGKAMYLLFVKAESRTPGGLVARPVLTSYYRSRQFLERPHDPYTEYTSPNEAILCVDSYQSMYTQLLCGLVHRADVLRVGAVFASGFLRAVRFLEKHWPRLCRDIRTGTLDPEITDRAVRDAVVGRVLRGANPALADEIEAECAGPSWEGIIRRLWPRTKYIDVIVTGAMSQYIPTLEFYGGGLPLACTMYASSECYFGLNLKPMCKPGDVAYTLIPTMCYFEFLPLQCSDGKAEPSHRDLVGLVDVKLGHEYELVVTTYSGLYRYRVGDVLRVAGFKNEAPMFKFIRRQNVALSIDSDKTDETELHAAVSGAVQHLAPFGASLVEYTSYADAATIPGHYVLFWELRAGSTAVPASVFEDCCLSVEEALNSVYRQCRACDKSIGPLEIRVVSEGTFDKLMDYAISRGASINQYKAPRCVRPGPVVELLDARVQAKYFSPKCPKWSPGNKQWNAASNGDA

SEQ ID NO: 43 - protein, 653 aa, Sorghum bicolor
MAHTPAMENSYVQVHHLATSMAIHTHKPFLAPPKHVHLAFHSPTSAPSRLLATTRSRPGLSQPAAMMAETDADKLRFIEEVTADVAAVQERVLAEILSRNADAEYLSTRCGGATDRATFRAKVPMVTYEDLQPYILRIAHGDRSPILSGSGYPVSELLTSSGAGDRKLIPVVDDDHDRHHRLHSLVGAVVNQYVPGLDKGSGLYFLFVKSETTTPGGLPARTILTRIFTSDGVWKLPYNPRRGLTSPAAAVVCEDTFQSMYTQMLCGLCHRHSVLRVGAAFASGVLRAIRFFQRNWPQLAADIDAGTITDRVTDHVLRQALAGVLTQPDPDLARVVRSEGSKADDGADMAGIIARLWPNTKYVHAVATGSMAHYVPALNHYSGGLPIVSTAYFSSECSVGINLRPMCDPSEVSYTVMPNMAYFEFLPTDDDDATASATSQLVELAGVEVGREYELVVTTYSGLCRYRVGDVLRVTGFHNTAPQLRFVRRRNAVLSVESDKTDEVELQRAVDRASAALLRPLGAAVADYTARTCAETVPGHYVVYWELQLPLGAADVVVDGGDVLDRCCLEMEEALSSVYRQSRVADGTVGPLEIRVVRPGTFEELADHAVARGASVGQYKVPRCVTAPPDIELLDSRVVSNHFSPALPKWVPG

SEQ ID NO: 44 - protein, 647 aa, Sorghum bicolor
MPEAPVTTMREAATAAAAAAVPETHRELLEYIERVTAGAAQVQRRVLAEILAQNAPAEYLRRLGVAGDAPGAVDAFRRAAPLVTYEDILPDVLRIANGDTSPILSGKPIREFLTSSGTSGGERKLMPAIADEMDRRSLLYSLLMPVMSQAVPGLDKGKCMYLYFVKAESRTPGGHPARPVLTSFYRSRHFLERPHDPYTVYTSPDEAILCVDAYQSMYAQLLCGLVHRADVLRVGAVFASGFLRAIRFLEKHWQRLCRDIRTGTLDAEAVTDRAVRAAVEQRVLLRADPALADAVEAECARTSWQGIIRRVWPNTKYIDVIVTGAMAQYIPQLEFYGGGLPLTCTMYASSESYFGINLNPMCKPSEVAYTLIPTMCYFEFLPLPQPGDDDAGEPDQRDLVDLVDVKLGHEYELVVTTYSGLYRYRVGDVLRVAGFKNQAPMFNFLRRKNVVLSIDADKTDEAELHAAVSGAVQHLAPFGASLVEYTSYADAGTIPGHYVLFWELRLRAAAAAGATPTPVPASVFEDCCLAVEEALNSVYRQGRAADRSIGPLEIRVVSDGTFDKLMDYALARGASINQYKAPRCVRPGPVVELLDGRVQASYFSPKCPKWSPGVGKQWSSDAAAAAKKAAAGGSNGGGGGGGAVVVA

SEQ ID NO: 45 - protein, 528 aa, Zea mays
MATYEDLQPYIRRIADGDRSPILSGHPVSEFLTSSGTSAGERKLMPTIEDELNRRQLLYSLQMPVMNLYVPGMDKGKALHFLFVKSETKTPGGLAARPVLTSYYKSNHFKNRPFDAYNNYTSPTAAILCADAFQSMYAQMLCGLCQRQDVLRVGAVFASGLLRAIRFLQLNWEQLAEDIEAGSLTPRVTDPSVREAVAGILRADPELAALVRSECSKGDWAGIITRIWPSTKYLDVIVTGAMAQYIPTLKYYSGGLPMACTMYASSECYFGLNLRPMCDPSEVSYTLMPNMCYFEFLPMDSAAASGGDASQLVDLARVEVGREYELVITTYAGLNRYRVGDVLQVTGFHNSAPQFRFVRRKNVLLSIESDKTDEAELQRAVERASALLRPHGAAVVEYTSQAYTKSIPGHYVIYWELLAKGPAGGAAVGEGTLERCCLEMEEALNTVYRQSRVADGSIGPLEIRVVRPGTFEELMDYAISRGASINQYKVPRCVTFPPIIELLDSRVVSSHFSPALPHWTPGQRSDSD

SEQ ID NO: 46 - protein, 614 aa, Zea mays
MAVMAEVVSTTGAALRSPASQPLPAAVKNADAEKLQFIEEMTSNVDAVQERVLGEILARNAGTEYLAKYGLAAATTDRATFRAKVPMATYEDLQPYIRRIADGDRSPILSGHPVSEFLTSSGTSAGERKLMPTIEDELNRRQLLYSLQMPVMNLYVPGMDKGKALHFLFVKSETKTPGGLAARPVLTSYYKSNHFKNRPFDAYNNYTSPTAAILCADAFQSMYAQMLCGLCQRQDVLRVGAVFASGLLRAIRFLQLNWEQLAEDIEAGSLTPRVTDPSVREAVAGILRADPELAALVRSECSKGDWAGIITRIWPSTKYLDVIVTGAMAQYIPTLKYYSGGLPMACTMYASSECYFGLNLRPMCDPSEVSYTLMPNMCYFEFLPMDSAAASGGDASKLVDLARVEVGREYELVITTYAGLNRYRVGDVLQVTGFHNTAPQFRFVRRKNVLLSIESDKTDEAELQRAVERASALLRPHGAAVVEYTSQAYTKSIPGHYVIYWELLAKGPAGGAAVGEGTLERCCLEMEEALNTVYRQSRVADGSIGPLEIRVVRPGTFEELMDYAISRGASINQYKVPRCVTFPPIIELLDSRVVSSHFSPALPHWTPGQRSDSD

SEQ ID NO: 47 - protein, 610 aa, Zea mays
MAVMAEVVSTTGAALRSPASQQPAAAGAAKGTDAEKLQFIEDMTSNVDAVQERVLGEILARNADTEYLAGRCGLAGATDRATFRAKVPMATYEDLQPYIRRIADGDRSPILSGHPVSEFLTSSGTSGGERKLMPTIEDELNRRQLLYSLQMPVMNLYVPGMDKGKALHFLFVKSETKTPGGLAARPVLTSYYKSNHFRNRPFDAYNNYTSPTAAILCADAFQSMYAQMVCGLCQRQDVLRVGAVFASGLLRAIRFLQLNWEQLADDIEAGSLTPRVTDPSVREAVAGILRPDPAVAELVRSECSGGDWAGIVTRIWPNTKYLDVIVTGAMAQYIPTLKHYSGGLPMACTMYASSECYFGLNLRPMCDPSEVSYTLMPNMCYFEFLPMGGAVDASQLVDLARVERGREYELVITTYAGLNRYRVGDVLQVTGFHNSAPQFRFVRRKNVLLSIESDKTDEAELQRAVERASALLRPHGAAVVEYTSQAYTKSIPGHYVVYWELLQAKGGAAVDGETLEGCCLEMEEALNAVYRQSRVADGSIGPLEIRVVRPGTFEELMDYAISRGASINQYKVPRCVTFPPIIELLDSRVVSSHLSPALPHWTAGQRSDSD

SEQ ID NO: 48 - protein, 547 aa, Zea mays
MSTSHARVKSDSNNGRTRTCDDGGSSGTSGGERKLMPAIADEMDRRSLLYSLLMPVMSQAVPGLDRGRCMYLYFVKAESRTPGGHPARPVLTSFYRSRHFLERPHDPYTVHTSPDEAVLCVDAYQSMYAQLLCGLVHRADVLRVGAVFASGFLRAIRFLEKHWQRLCRDLRRGALGAEVTDRSVRAAVARVLRADPALADAVEAECARPSWQGIIRRVWPGTKYIDVIVTGAMAQYIPTLEFYGGGLPLTCTMYASSESYFGINLNPMCKPSEVAYTLIPTMCYFEFLPLPQPGPGGTDDADPDHRDLVDLVDVKLGHEYELVVTTYSGLYRYRVGDVLRVAGFKNQAPMFKFLRRKNVVLSIDSDKTDEAELHAAVSGAVQHLAPFGASLVEYTSYADAGTIPGHYVLFWELRLRAGDVPVPVPASVFEDCCLAVEEALNSVYRQGRAADRSIGPLEIRVVSDGTFDRLMDYALARGASINQYKVPRCVHPGPVVELLDGRVQASYVSPKCPKWSPGGGKQWSSDAAAKKPAAAAGSNNGGGAVVA

SEQ ID NO: 49 - protein, 633 aa, Zea mays
MPEAPVVTMRDTAAAAPPATHRDLLEYIERVTAGAAQVQRRVLSEILAQNAPAEYLRRLGVSGAAPGAVEAFRRAAPLVTYEDILPDVLRIANGDTSPILSGKPIREFLTSSGTSGGERKLMPAIADEMDRRSLLYSLLMPVMSQAVPGLDRGRCMYLYFVKAGSRTPGGHPARPVLTSFYRSRHFLERPHDPYTVHTSPDEAVLCVDAYQSMYAQLLCGLVHRADVLRVGAVFASGFLRAIRFLEKHWQRLCRDLRRGALGAEVTDRSVRAAVARVLRADPALADAVEAECARPSWQGIIRRVWPGTKYIDVIVTGAMAQYIPTLEFYGGGLPLTCTMYASSESYFGINLNPMCKPSEVAYTLIPTMCYFEFLPLPQPGPGGTDDADPDHRDLVDLVDVKLGHEYELVVTTYSGLYRYRVGDVLRVAGFKNQAPMFKFLRRKNVVLSIDSDKTDEAELHAAVSGAVQHLAPFGASLVEYTSYADAGTIPGHYVLFWELRLRAGDVPVPVPASVFEDCCLAVEEALNSVYRQGRAADRSIGPLEIRVVSDGTFDRLMDYALARGASINQYKVPRCVHPGPVVELLDGRVQASYVSPKCPKWSPGGGKQWSSDAAAKKPAAAAGSNNGGGAVVA

SEQ ID NO: 50 - protein, 604 aa, Zea mays
MAPTTATAAAVGTKATALGVAACERDVEKLEFIEDKTRNFDAEQVRVLAEILARNNGAEYLRRHGMEGRTDRLAFKACVPVVTYEDLRPEIERIANGDRSNIISSHPITEFLTSSGTSAGERKLMPTIEDELNRRQMLYSLLMPVMNLYVPGLDKGKGLYFLFIKSETKTPGGLPARPVLTSYYKSDHFKHRPYDPYNVYTSPTAAILCTDSFQSMYSQMLCGLVARAEVLRVGAVFASGLLRAIRFLQLHWQELAHDLRTGTLSAKVTEPSIREAVAEVLRPDAGLADLVEAECGKESWEGIITRVWPNTKYLDVIVTGAMAQYIPTLKYYSGGLPMACTMYASSECYFGLNLRPMCDPSEVSYTIMPNMGYFELLPHDPDAVPPSRDDPPPRLLDLADAEVGRDYELVITTYAGLCRYRVGDILHVTGFHNAAPQFRFVRRKNVLLSVDSDKTDEAELQAAVERAARLLAPYDAAIAEYTSQADATTIPGHYVVYWELMVREGGASPDAAVFERCCLEMEEALNAVYRQGRNGDAIGPLEIRVVRGGTFEEVMDYAISRGASINQYKAPRCVSFGPIIELLNSRVVSSHFSPACPTYSPHKK

SEQ ID NO: 51 - protein, 636 aa, Physcomitrella patens
MASEVAKPVENGIHPKLEQSFDAPAATKPSNSELLKLHRDGVPFVMPSKRGIDTTAPDFDPQDFLDLLAEDVMFIQHEKLREILEVQADVEYLRRVGLNGRTDVESFRKCVPIVSYGDLEADIMRVVNGEKTPIFTVDPIVTLNLSSGTTAGKPKFIPSTTRAYEYFMFLQTFVTSIYRREFPGYKDGTSFTLAFAGKQIDTPSGIKAGAQSTNHFRGPMFRNRVRNANREYCVPDEVILSDDTTQSMYCHLLCALAQAPEIVKVYGTFAASIVSAVRALQKHWSEIVEDIRTGTLNAKITEPEMRTAVQQMLHPNPDLASRIEEECSKDNWEGILPRLFPNAHFVSCVISGSMLQYAPALKHFSGHLPTISLAYAACECSFIGFNPSMKCAPEDITYMLWPETAYYEFIPLDEDSNPEQDGDVVRTVEACDLEVGRQYELVVTNVIGLYRYRLGDVLTMKRFHKTAPVFEFVRRKNVILSVHTDKTDEKELQSVVNLATEALAGTGMELSDYTSTADVSTLPGRYVIFWEMVDSSDLDYDVLQHCANTLDANFNSDYRRWRSGHQIGPLELRIVKEGTFNRVMDSAVARGASPSQYKPPRCVNNPHTRQILDDGLVASFHSTITPNPAPIALTGS

SEQ ID NO: 52 - protein, 599 aa, Physcomitrella patens
MALRIENPYYKLLDTDEEIVEDFELMSRNARETQLELLRKILERNANVEYLQRQGLNGRTDEASFKACVPVSTYANIEADVDRIADGDTSPICCVDPPTSFALSSGTTGGKCKLIPRTDALLAQAMKAGQIGSVYRRRAFPRKHEGPPVVMSFQYAGRQFDTKSGLKAGTGTTNFYRSAAFKNAKSAPFSATSPVDIVLGYDVPQQMYCHLLCGLYRCQEVEQMSAIFAYMIVEPFRLLERVWRDICKDIREGTVNERVSDPELRSSVLKVLSPNPELADLIERECAKGWSGIIERLFPNINYIMSIFSGSMLPYVAPMRQYAGSVPLMNADYGASEAWIGINLDPRCPAEDASFTIIPNFAYFEFIPVNRDSAGYDSVEGDEIVGLTDVKVGQEYEIVLTTVGGLYRYRLGDIVKVTGFFNSTPKVAFVCRKGVVLSVNTDKTDEEELRLVVGKASLLLKESNMELADYSSYTDQDSQPGHYVIFWELRSHEHLDMDLLSECCKVLDQSFNNPYMRGRAARTIGPLELAIVKEGAFARLMEQFVRKNGVGASQYKVSRCFKNPATLKHFRDETIATLRSPDFPPELLAAWRPSTKIVG

SEQ ID NO: 53 - protein, 595 aa, Selaginella moellendorffii
MDPPRLGSAHRILSALDTDEQVLRFVEAITSDVASIQSELLQQILADNADVAYFHRHGLFGVPSAEDFHSRLPLISYQDIELDVARIASGDEDGHAKILCARPVREVLKSSGTSGGRQKLFPKLSDYDPEFLVLNRVARPFNTGKSLHFIYVRNPEVTPGGVKLSSGLSGYFTSPAFRNRKIDPATSYTSPDQVLQCVDYIQANYCHLLCGLVQRDQVVSVGSVFASTFVRSLKSLKCQWRDICQDIAEGAVNSRIVTSLPVRNAVNAILRPDIELADAIRKECCGGNWRGIVRRLWPEARLVQTIITGTMQQYVSIIDMLTDGLPIASSLYASSECSSLGVNLDPVCPPSEVLYTLFPCFAYFEFLPLENRLSAPDEDQGQEERSFVSCDNLVKLADVKVGDEYELVLTTKAGLYRYRVGDILKVVKFHNDAPQFAFVRRAGVLLSVDMDKTDELELHKAVTQAWNRHQEHSEIRLVDYTSRVDLSSQPGHYIIYWEAFPDPQILELDVCCFELEESLSVVYRRNRREGSVGPLEIKLVRQGTFDKIMDHVVQNGGASYGQYKTPRCAKDPKVVSILESSVIAKGQARYMQTST

SEQ ID NO: 54 - protein, 609 aa, Selaginella moellendorffii
MDPPRLGSAHRILSALDTDEQVLRFVEAITSDVASIQSELLQQILADNADVAYFHRHGLFGVPSAEDFHSRLPLISYQDIELDVARIASGDEDGHAKILCARPVREVLKSSGTSGGRQKLFPKLSDYDPEFLVLNRREARFSSCPDRRHSRQGPFNTGKSLHFIYVRNPEVTPGGVKLSSGLSGYFTSPAFRNRKIDPATSYTSPDQVLQCVDYTQANYCHLLCGLVQRHQVVSIGSVFASTFVRSLKSLKCQWKDICQDIAEGAVNSRIVTSVPVRNAVNAILRPDIELADAIRKECCGGNWRGIVRRLWPEARLVQTIITGTMQQYVSIIDMLTDGLPIASSLYASSECSSLGVNLDPVCPASEVLYTLFPCFAYFEFLPLENRLSAPDEDQGREERSFVSCDNLVKLADVKVGDEYELVLTTKAGLYRYRVGDILKVVKFHNDAPQFAFVRRAGVLLSVDMDKTDELELHKAVTQAWNRHQEHSEIRLVDYTSRVDLSSQPGHYVIYWEAFPDPLIPELDVCCFELEESLSVVYRRNRREGSVGPLEIKLVRQGTFDRIMDHVVQNGGASYGQYKTPRCAKDPKVVSILESSVIAKGQARCMQTST

SEQ ID NO: 55 - protein, 577 aa, Selaginella moellendorffii
MNTRDSDDQILDFVGDITRDVGAVQAGILEQILAKNANVEYFKRHGLCGVPSRDDFKRAMPLSSYTDIESDITRMASGDDSRILTDAPVRQMLTSSGTSGGKQKLFPKSETYDIESVLMNRISRACLNKQIPIQGKSLQFIYVRKPGVTPGGVVTCSGLSGYFTSPAFLNRKIDPSSGFTSPDQVLLCVDFDQSSYAHLLCGLVQSTQVAVLGAPFASTLVRSMKRLSDCWRDLCQDIRSGKANSNIISDLSVKHAVNALLRTPNPELADAIERECSKKNWRGIITRLFPNARVIQTIITGSMQQYVPVIDFLSGELPIASPLYASSECSSLGVNLSPLSPPSPILYTIFPSFAYYEFLPVNCKNSTSGDLVELADVELGREYELVITNRAGLYRYRVGDVLRVVDFYNSAPQFAFVRRAGVLLSVDTDKTDELELHTAVVNACSLLPQDVFVVDYTSRVELCSHPGHYVVYWELSLPVSDSSVELLKLEECCSMLESSLSVVYLRNRREGSVGAMEIKLLQNGTFDRIVDYVVSNREGSVAQFKVPRCARDPTMIDILESNVVRSIRATHIPLPRL

SEQ ID NO: 56 - protein, 580 aa, Selaginella moellendorffii
MENEQLLLEKLESSSWSPGEAQDKVLTEILGKNATTVYFNRHGLRAATKEVFRQRAPVIEYEDIKDEINRIADGEASTLLCANPITDMFTSSGTSGGAHKLFPKAEGHYAVSNYFFDLATALLNRYSDLPGLRTGKALYFLYVRSGRKTPGGLPAYPALTGYYNSLEFRNRPFDPSNDYTSPMEVILCTDSVQASYCHLLCGLIHARDVTKLGCFFASALVRSIRCLEAWWQELSRDIRTGTLSERVVDPACREAVEKILRPDPELANVIDEACSSGSLKGIVRKLWPSAKAIDTVVTGAMEQYVGEVDYLTGGLPIASMIYASSESFFGVNLKPLCEPSQISYMFLPETSYYEFLPVARSEEKVSRKEPVELVDVEQGHEYELVITTNAGLYRYRMGDVLRVEGFHNKAPLFSFVCRRNVLLSIDSDKTDEKELQTAVMNAFAALRNGVTSKEGEAIRLTDYTSYADLSSNPPHYVIYWELSSELHLEPEKAGECCYKMEESLSVVYHRGRMERSIGALELRLVTPGTFNRIADDAASRGGSVAQFKLPRCVKKNATRMLEIVESGVYQQYFSPRAPKY

SEQ ID NO: 57 - protein, 578 aa, Selaginella moellendorffii
MENEQLLLEKLESSSWSPGEAQDKVLAEILEKNAATDYFNRHGLRAATKEVFRQRAPVIEYEDIKDEINRIADGEAATLLCANPIADMFTSSGTSGGAHKLFPKVEGHYAVSKYFFDLATALLNRDLPGLRTGKALYFLYVRSGRKTPGGLPAYPALTGYYNSLEFRNRPFDPSNDYTSPLEVILCTDSVQASYCHLLCGLIHARDVTKLGCFFASVFVRSIRCLEAWWQELSRDIRTGTLSERVVDPACREAVEKILRPDPELANVIDEACSSGSLKGIVRKLWPSAKAIDTVVTGAMEQYVGEVDYLTDGLPIASMIYASSESFFGVNLKPLCEPSQISYMFLPETSYYEFLPVARSEEKASREEPVELVDVEQGHEYELVITTNAGLYRYRMGDVLRVEGFHNKAPLFSFVCRTNVLLSIDSDKTDEKELQTAVMNAFAALRNGVTSKEGEAIRLTDYTSYADLSSNPPHYVIYWELSSELHLEPEKAGECCYKMEESLSVVYHRGRMERSIGALELRLVTPGTFNRIADDAASRGGSVSQFKLPRCIKKNATRMLEIVESGVYQQYFSPRAPKY

SEQ ID NO: 58 - protein, 598 aa, Selaginella moellendorffii
MNLEHKEREKQALQFIEKVTSEAAEVQSAVLSAILERNAHTEYLKRHGLNGRTDKTSFRQCLPVITYEDLEPEIQRIANGDTSPILSAHPISEFLTSSGTSAGQRKLMPTISEEFERRCLLYSLLMPVMNQYLPGLDQGKGMYLFFIKSEAKTPGGLLARPVLTSYYKSRYFTERPYDPCNVYTSPNETVLCPDAHQSMYCQLLCGLLQRHEVLRMGAVFASGFLRAIRFLETHWRELCDDIRAGGLNELVVDAAARRAVLALMPRPDPALADDIAEQCRKESWAGIIARLWPNTKYIDVIVTGTMAQYIPTLDYYSGGLPLVCTMYASSECYFGINLQPLCPPSEVSYTLLPNMAYFEFLPIKPKSGKSKAPRVPDPSELVELVDVKMGHEYELVITTYAGLCRYRVGDILRVTGFHNSAPQFAFVCRKNVVLSIDSDKTGEEDLAKAVRSATAGIESSYGARLIEYTSYADTTTIPGHYVLFWELRSSSPIPKDVLEECCLAIEESLDSVYRQGRVSDRSIGPLEIKVVKPGTFDQLMDYALSRGASINQYKTPRCVKFTPIVELLNARVVSSYFSPRLPKWSPVRPQWANSNGVH

SEQ ID NO: 59 - protein, 493 aa, Selaginella moellendorffii
MCRNATFVQEEILGAIVEHNASCEYLRSYNVTDADSFKAHIPIVDYENIAARIQRMADGGPGSVLCKDPVIAFILSSATTTDKRKAFPLTTKSRSLKNHADKISAGYGERDFPVGSFPTALAFMYAQPHGTLSKSGLPIMPGSSFYFTSQAYKERPSRSISTDEVIFGPWWESTYCHLLSGLILRTEVDYITSFFAYTLVHAFNMLEAEWRNLCYDIRTGKLDERVKDVKLRAAVAGVLREDPDSAGSIEEVCSSNVSWDQGIVLKLWPKAKYLLTVVTGDMKPYIPALRRYAGGVHIMGREYIGSEGVYGININPATEPENVVFTLVPTTLYMEFLRLRDNKLVDSSDLEIGEQYELVITTHSGLYRYKVGDVVKVVAFFHESPQMAFEYRCMKQELQNVVRRTCIEANLEIVDFTSHSNLSEQPGHYVIYWELKNEPNIYSNHALLDRPFTSIVYIPERSEKWLCSWTVQDSKRRLSPLIEARNTLPKDQI

SEQ ID NO: 60 - protein, 561 aa, Selaginella moellendorffii
MEALVNEFEDMCRNAALVQEEILGAIVEHNASCEYLRSYNVTDTDSFKAHIPIVDYEDIAARIQRMADGGPGSVLCKDPVIVFILSSATTTDKRKAFPLTTKSRSLKNHADKISAGYRERYIMLSQQNLINSSLAFMYAQPHGTLSKSGLPIMPGSSFYFTSQVYKERPSRSTSTDEVIFGPWWESTYCHLLSGLILRTEVDYITSFFAYTLVHAFNMLEAEWRNLCYDIRTGKLDERVKDVKLRAAVVGVLREDPDSAGSIEEVCSSNVSWDQGIVLKLWPKAKYLLTVVTGGMKPYIPALRRYAGGVHIMGRAYIGSEGVYGINIDPATEPENVVFTLVPTTLYMEFLRLRDNKLVDSSNLEISEQYELVITTHSGLYRYKVGDVVKVVAFFHESPQMAFEYRRSAVLSVSLDMTSEQELQNVVRRTCIEANLEIVDFTSHSNLSEQPGHYVIYWELKNEPNIYSNHALLNRCCNVLDRSFTSILYITGRRTGTIGPLKLVTVKKGCFGRLLEHAVRNGSAAGQYKTPRCIKSPKVLEILEGEIVTTYRSSEYLPKDHI

SEQ ID NO: 61 - protein, 546 aa, Selaginella moellendorffii
MEALINEFEDMCRNAAAVQEEVLGTIVEHNASCEFLQSYNVTDVDSFKAHVPVVGYEDIAAKIQRMADGDPSSILCKDPVLAFISSSGTTTEKRKAFPLTTKSCDVKKHALHKIGAAYLERDFPVGSFPTALAFMYAHPCETLSKSGIPIMPVSNFTFTSQAYKERPSRSTSPDEVIWGPWWESTYCHLLCGLIQRMEVDYITSFFAYTLVQALNMLEAEWRSLCHDIRTGKLDERVKDVKLRAAVAGVLHEDPDSAGFIEEPKAKYLWTVVTGGMKPYVPPLRRYAGGVHIIGRAYMGSEGVYGINMDPATEPENVVFTLVPTTLYMEFLRLRDNKLVDSSNLEIGEQYELVITTYSGLYRYKVGDVVKVVSFFHQSPQMAFEYRTSALLSVNLDVASEQELQNVVRRTCNEANLEIVDFTSHSNVTEPPGYYVIYWELKNKPDYSNHALLNRCCDVLDRSFTSSTYIMGRRSGTIGPLKLVILERGSFGRIMEYAVSNGSAPGQYKTPRCIKSPKVLKILEEGIVSTYRSSKYPSYYNLIQYIN

SEQ ID NO: 62 - protein, 563 aa, Selaginella moellendorffii
MAASAIAEFEDACKNAASIQEELLLGILRKNACCEYLQKYGSPLTVAAFKSQVPVIGYDDIRSDLERIAGGDRGQILCHDPITSFFTSSGTSSGKNKNIPATYENTVSVVKVLESSYAYKTNYFDLGKGRSVSLLYFKDLHATKSGLVFGPVTAHGIRSTRFRQVWRSSRTTPYEVLVAASDFRELTYCHLLCALLQRHEVEQVECMYAYSICEALRLFQNEYWEELCNDIRTASLSKTKVMDPKLRKAFERAGVFRSKCGNAMEADKIFKICSNESWSGILPLLFPKAKLVSAVVTGAMTHYVPTLSFYAGDQLPIVGQGFFSSEGGIGINIDPLSPPEDVIYTVTPRSLYYEFLPLGATEALSMHEVVIGELYEILVTNFAGLYRCRMGDVVQITSFFHGAPQMAYHHRKNAVMCINNETVDEQMLQNVVNKVSKDAGVEVLDFMIYGDPAAVPPSYTIFWELGNAKDYSKTQVLEQCCANVLKSFNPEHTRKGTDGLIDSFELVIVKKGTFERLMEEAVKNGASPAQYKTPRCVASSRILEALNSGRVHSYKSSAMSKVN

SEQ ID NO: 63 - protein, 557 aa, Selaginella moellendorffii
MASIAEFEQACENGASIQEELLGGILRKTHYLQKFGSPQSLAAYKSQVPIVSYEDVAGVIEKIACGEEGPILCHDQNLLLPTSSGKGKIIPVTAENISALMRAAEISNAYIARYGRVLGLYYCGHQSHTKAGIWVGALTTYLIKTYRGPFNKFTTPYEMIISGSNWRELTYCHLLCALIQRDAVEQIDASFAYIICGALKILQSDWQDICNDIRTGSLSSGKVTHPKLQEAFANFLVNKENIAGTADAIAKICSRESWSGILSLLFPGAKLVSAVVTGAMAHFVPELRDYAGGKLPISGKDYYSSEGVLGINTNPASPLEDVVFTILPHIMYYEFLPLGANNPAGEILAPHEVVVGQEYEIVITTFAGLYRYRVGDVVKVSSFFHGVPQLAFSYRKNAVLSVQNEMVDEQELQNVVMEVSKDAGIEVANFTAYGNSTAVPAHYVIFWELKRREGINRELLERCCSSIDRSFNPGYTGKRLDEVIDSLELVIVKEGTFERLMEEAVRNGTSPAQYKTPRCVTSPRMLEVLESGRVQSYKSGEMPRSVFESWEPSFPQG

SEQ ID NO: 64 - protein, 533 aa, Selaginella moellendorffii
MEDFEAVCKNAVQAQEEALVQILQRNGSCQYLQRSGQPLCLKSFKAQLPIISYDNISPELQQIADHGTSHLLLGCDPILYFTFSSGTSSGKHKILPQTNCGYSLLARAYASSNAYRDEIFPLESTKPIGLHFVYSGEQYKAKSGLLIGAGSTNYYKSEAYNQEAETLATPYEALLAGSDWQQTTYCHLLCGLVQRHKIEFIHATFAYTLSEVFRLLESNWKILCEDISARRVSESKVTDEKLRVPVLKLMERELRGKDSSQVAREISEIFIAGTESRWSGLLPLLWPRAKYVHTVVTGAMEPYIPVLKKYAGDKLAIVGFDYSASEGYLGINMRPATPPEEVVFTLIPYTMFFEFIPVDPEEVPDHQKGETLGFKDLQVGKQYELVVTTFEGFACPLEIANFTSCADFTTKERPHYVIYWELKNDGDNSRHEELRDSCNALDRGFNAAYLTGGVDKTLGALELVTVKQGTFEKLMEKAIESGALASQYKTPRCIKSPALLELLDRGAIGRYTSSEDISSLLAEDWKPSVIHGL

SEQ ID NO: 65 - protein, 487 aa, Selaginella moellendorffii
MEDFEAVCKNAVQAQEEALVQILQRNGSCHYLQRFGQPLCLKSFKAQLPIISYDNISPELQQIADHGTSHLLLGCDPILYFSFSSGTSSGKHKILPQTNCGYSLLARAYASSNAYRDEIFPLESTKPIGLHFVYSGEQYRAKSGLLLGAGSTNYYKSEAYNQEAETLATPYEALLAGSDWQQTTYCHLLCGLVQRHKIEFIHAAFAYTLSEAFRLLESDWKILCEDISARRVSESKVKDEKLRVPVLKLMERELRGKDSSQVAREISEIFVAGTESRWSGLLPLLWPRAKYVHTVVTGAMEPYIPVLKKYAGDKLAIVGFNYSASEGYLGINMRPATPPEEVVFTLIPYTMFFKFIPVDPEEVPDHQKGETLGFKDLQVGKQYELVVTTFEGLYRYRIGDVVKVTGFHHESPIVAFSYRKNAVLSINVEKVDEQELQKVVMGSASPLEIANFTSCADFTTKERPHYVIYWELKNDGDNSRHEELRDS

SEQ ID NO: 66 - protein, 583 aa, Selaginella moellendorffii
MEDFEAVCKNAVQAQEEALVQILQRNGSCHYLQRFGQPLCLKSFKTQLPIISYDNISPELQQIADHGTSHLLLGCDPILYFSFSSGTSSGKHKILPQTNCGYSLLARAYASSNAYRDEVFPLESTKPIGLHFVYSGEQYKAKSGLLLGAGSTNYYKSEAYNQEAETLATPYEALLAGSDWQQTTYCHLLCGLVQRHKIEFIHATFAYTLSEAFRLLESDWKILCEDISARRVSESKVTDEKLRVPVLKLMERELRGKDSSQVAREISEIFVTSKESRWSGLLPLLWPRAKYVHTVVTGAMEPYIPVLKKYAGDKLAIVGFDYSASEGYLGINMRPATPPEEVVFTLIPYTMFFEFIPVDPEEVPDHQQGETLGFKDLQVGKQYELVVTTFEGLYRYRIGDVVKVTGFHHESPIVAFSYRKNAVLSINAEKVDEQELQKVVMGSAGPLEIANFTSCADFATKERPHYVIYWELKNDGDNSRHEELRDSCNALDRGFNAAYLVGRVDKTLGALELVTVKQGTFEKLMEKAIESGASASQYKTPRCIKSPALLELLDQGAIGRYTSSEDISSLLAEDWKPSVIHGL

SEQ ID NO: 67 - protein, 582 aa, Selaginella moellendorffii
MPGIPLISHSDALTYGFEELARNGNVVQAELLEQILVQNADADYLKEHKLNGCTDLETFKARLPLITYADIEGYIQKIADGDQSPVLCQKPVDMFFLSSGTAKGRTKLIPAHYDFFLNTIRLFQLSGAFRGRHFPLSSNAKVMDIVYCGKQTMTKGGILTGTGTTNYFRSEAFKLKQQSTKMFNSSPNEVIFSSSLPQATYCHLLFALLAADDIAVISSTFVYTIVEAFRFLEKTWSILADCIESGTLPEWITDHAIQTVASKQLTQDHPDRDRGTLAAKIRLECSRGFQGIIPRLWRNTSYVLSIMTGTMLSYCEAMRFYAGPGLALVCGDYGASESWMGINIDPLSSPHNTIFTIVPDLAYFEFIPLERRNSLFTEVAAPVSMADVRVGQEYEIAITTSSAGLYRYRVGDVVRICGFYHDLPQFVFVCRRDVQLSIHIDKNGETELAVVMERSAAVLHGTGVGVAEYTAHADVSFRPGHYVVFVELDRDDFERVLQECCDCMDGAFVEPGYVVSRAAKTIGPLELCVVERGTFRKLAESALDKGATLNQYKTPRCIAAPHLLAILRAGMVRSFYSGVRRE

SEQ ID NO: 68 - protein, 590 aa, Arabidopsis lyrata
MAVDSNLSSPLGPPACEKDAKALRFIEEMTRNADTVQENLLAEILARNANTEYLRRFNLGGATDRDTFKTKIPVITYEDLQPEIQRIADGDRSPILSSHPISEFLTSSGTSAGERKLMPTIREELDRRQLLYSLLMPVMNLYVPGLDKGKGMYFLFVKSESKTPGGLPARPVLTSYYKSEHFRSRPYDPYNVYTSPNEAILCPDSFQSMYTQMLCGLLDRLSVLRVGAVFASGLLRAIRFLQLHWSRFANDIELGCLDSEITDPSIRQCMSGILKPDPVLAEFIRRECKSDNWERIITRIWPNTKYLDVIVTGAMAQYIPTLEYYSGGLPMACTMYASSECYFGLNLNPMSKPSEVSYTIMPNMAYFEFIPLGGTKAVELVDVKIGKEYELVVTTYAGLCRYRVGDILRVTGFHNSAPQFHFVRRKNVLLSIDSDKTDESELQKAVENASKILHEECGSRVAEYTSYADTSTIPGHYVLYWELLVRDGARQPSHETITRCCLEMEESLNSVYRQSRVADNSVGPLEIRVVRNGTFEELMDYAISRGASINQYKVPRCVNFTPIVELLDSRVVSAHFSPSLPHWTPERRRR

SEQ ID NO: 69 - protein, 594 aa, Arabidopsis lyrata
MTVDLPLRSPMNYSPSDKDVKALRFIEEMIRNVDFVQNKVIREILRRNSETEYLKRFGLKGFTDRKAFKTKVPVVTYDDLKPEIQRIANGDRSMILSSHPITEFLTSSGTSAGERKLMPTIEEDMDRRQLLYSLLMPVMNLYVPGLDKGKALYFLFVKTESKTPGGLPARPVLTSYYKSEQFKRRPYDPYNVYTSPNEAILCPDSSQSMYTQMLCGLLMRHEVLRLGAVFASGLLRAIGFLQTNWKELANDISTGTLSSRISDPAIKESMSKILTKPDQELADFITSVCGQDNNWEGIITKIWPNTKYLDVIVTGAMAQYIPMLEYYSGGLPMACTMYASSESYFGINLKPMCKPSEVSYTIMPNMAYFEFLPHEVPTGKSELVELADVEVGKEYELVITTYAGLNRYRVGDILQVTGFYNSAPQFKFVRRKNVLLSIESDKTDEAELQKAVENASVLLGEQGNRVIEYTSYAETKTIPGHYVIYWELLVKDQTNPPNDEVMARCCLEMEESLNSVYRQSRVADKSIGPLEIRVVKNGTFEELMDYAISRGASINQYKVPRCVSFTPIMELLDSRVVSTHFSPALPHWSPERRC

SEQ ID NO: 70 - protein, 597 aa, Arabidopsis lyrata
MAVDSPLQSRIASPTTSEKDMKALMFIEEMTRNPDSVQEKVLGEILSRNSNTEYLKRFDLNGAVDRKTFKSKVPVVMYEDLKTEIQRISNGDRSPILSSHPINEFLTSSGTSSGERKLMPTIEEDIHRRQLLGSLLMPVMNLYLPGLDKGKGLYFLFVKSESKTSGGLPARPALTSYYKSDHFKTSDLQNDYTSPREAILCSDSSQSMYAQMLCGLLMRHEVLRLGAVFPSGLLRAISFLQNNWKELAQDISTGILSSKIFDPAVNNRMSKILNKPDEELAEFLIGVCSQENWEGIITKIWPNTKYLDVIITGAMAQYIPMLEYYSGGLPIASTIYASSESYFGINLNPMCKPSEVSYTIMPNMAYFEFLPHNHDGDGALDETSLVELADVEVGKEYELVITTYAGLYRYRVGDILCVTGFHNSAPQFKFIRRKNVLLSIESDKTDEADLQKAVDNASRLLAEQGTSVIEYTSYAETKTIPGHYVIYWELLGRDQSNALPSDEVMAKCCLEMEESLNSVYRQSRVSDKSIGPLEIRVVQNGTFDELMDYAISRGSSINQYKVPRCVSLTPILELLDSRVVSAHFSTSLPHWSPERRH

SEQ ID NO: 71 - protein, 612 aa, Arabidopsis lyrata
MPEAPKKVSLEVFDLTLDQKNKQKLQLIEELTSNADQFQRRVLEEILSRNADVEYLRRHYLNGRTDRETFKNVMPVITYEDIQPEINRIANGDKSPILSSKPISEFLTSSGTSGGERKLMPTIEEELDRRSLLYSLLMPVMSQFVPGLENGKGMYFLFIKSESKTPGGLPARPVLTSYYKSSHFKERPYDPYTNYTSPNETILCSDSYQSMYSQMLCGLCQHQEVLRVGAVFASGFIRAIKFLEKHWTELVRDIRTGTLSSLITDPSVREAVSKILKPNSKLAEFVEFECKKSSWQGIITRLWPNTKYVDVIVTGTMSQYIPTLDYYSNGLPLVCTMYASSECYFGVNLRPLCKPSEVSYTLIPSMAYFEFLPVHRNNGVTNSINLPKALTEKEQQELVDLVDVKLGQEYELVVTTYAGLCRYRVGDLLRVTGFKNKAPQFSFICRKNVVLSIDADKTDEVELQNAVKNAVTYLVPFDASLSEYTSYADTSSIPGHYVLFWELCLDGNTPIPPSVFEDCCLTVEESFNTVYRQGRVSDKSIGPLEIKIVEPGTFDKLMDYAISLGASINQYKTPRCVKFAPIIELLNSRVVNSYLSPKCPKWVPGHKQWGSN

SEQ ID NO: 72 - protein, 612 aa, Arabidopsis lyrata
MPEAPKIVALEVSDESLAEKNKNKLQFIEDVTTNADDVQRRVLEEILSRNADVEYLKRHGLDGRTDRETFKHVMPVVTYEDIQPEINRIANGDKSQILCSNPISEFLTSSGTSGGERKLMPTIEEELDRRSLLYSLLMPVMNQFVPGLDKGKGMYFLFIKSESKTPGGLPARPVLTSYYKSSHFKNRPFDPYNNYTSPNQTILCSDSYQSMYSQMLCGLCQHKEVLRVGAVFASGFIRAIKFLEKHWSELARDIRTGTLSSEITDLSVREAVGEILKPDPKLADFVESECRKTSWQGIITRLWPNTKYVDVIVTGTMSQYIPTLDYYSNGLPLVCTMYASSECYFGVNLRPLCKPSEVSYTLIPNMAYFEFLPVHRNSGVTSSISLPKALTEKEQQELVDLVDVKLGQEYELVVTTYAGLYRYRVGDVLSVAGFKNNAPQFSFICRKNVALSIDSDKTDEVELQNAVKNAVTHLVPFDASLSEYTSYAETSSIPGHYVLFWELCLNGNTPIPPSVFEDCCLTIEESLNSVYRQGRVSDKSIGPLEIKMVESGTFDKLMDYAISLGASINQYKTPRCVKFAPIIELLNSRVVDSYFSPKCPKWAPGHKQWGSN

SEQ ID NO: 73 - protein, 603 aa, Arabidopsis lyrata
MAVDSPLQSRMVSPTTSEKDVKALKFIEEMTRNPDSVQEKVLGEILSRNSNTEYLKRFDINGAIDRNTFKNKVPVVTYEDLKPEIQRISNGDRSPILSSHPITEFLTSSGTSAGERKLMPTIEEDLDRRQLLYSLLMPVMNLYVPGLDKGKGLYFLFVKSESKTSGGLPARPVLTSYYKSDHFRRRPYDPYNVYTSPNEAILCSDSSQSMYAQMLCGLLMRHEVLRLGAVFASGLLRAISFLQNNWKELARDISTGTLSSRIFDPTIKNRMSKILIKPDQELAEFLIGVCSQENWEGIITKIWPNTKYLDVIVTGAMAQYIPTLEYYSGGLPMACTMYASSESYFGINLKPMCKPSEVSYTIMPNMAYFEFLPHNHDGDGATEASLDETSLVELADVEVGKEYELVITTYAGLYRYRVGDILRVTGFHNSAPQFKFIRRKNVLLSIESDKTDEAELQKAVENASRLFAEQGTRVIEYTSYAETKTIPGHYVIYWELLGRDQSNALPSEEVMAKCCLEMEESLNSVYRQSRVADKSIGPLEIRLVQNGTFEELMDYAISRGASINQYKVPRCVSFTPIMELLDSRVVSAHFSPSLPHWSPERRR

SEQ ID NO: 74 - protein, 590 aa, Arabidopsis thaliana
MAVDSNLSSPLGPPACEKDAKALRFIEEMTRNADTVQENLLAEILARNADTEYLRRFNLCGATDRDTFKTKIPVITYEDLQPEIQRIADGDRSPILSAHPISEFLTSSGTSAGERKLMPTIKEELDRRQLLYSLLMPVMNLYVPGLDKGKGMYFLFVKSETKTPGGLPARPVLTSYYKSEHFRSRPYDPYNVYTSPNEAILCPDSFQSMYTQMLCGLLDRLSVLRVGAVFASGLLRAIRFLQLHWSRFAHDIELGCLDSEITDPSIRQCMSGILKPDPVLAEFIRRECKSDNWEKIITRIWPNTKYLDVIVTGAMAQYIPTLEYYSGGLPMACTMYASSECYFGLNLNPMSKPSEVSYTIMPNMAYFEFIPLGGTKAVELVDVNIGKEYELVVTTYAGLCRYRVGDILRVTGFHNSAPQFHFVRRKNVLLSIDSDKTDESELQKAVENASSILHEECGSRVAEYTSYADTSTIPGHYVLYWELLVRDGARQPSHETLTRCCLGMEESLNSVYRQSRVADNSVGPLEIRVVRNGTFEELMDYAISRGASINQYKVPRCVNFTPIVELLDSRVVSAHFSPSLPHWTPERRRR

SEQ ID NO: 75 - protein, 603 aa, Arabidopsis thaliana
MAVDSPLQSRMVSATTSEKDVKALKFIEEMTRNPDSVQEKVLGEILTRNSNTEYLKRFDLDGVVDRKTFKSKVPVVTYEDLKPEIQRISNGDCSPILSSHPITEFLTSSGTSAGERKLMPTIEEDLDRRQLLYSLLMPVMNLYVPGLDKGKGLYFLFVKSESKTSGGLPARPVLTSYYKSDHFKRRPYDPYNVYTSPNEAILCSDSSQSMYAQMLCGLLMRHEVLRLGAVFASGLLRAISFLQNNWKELARDISTGTLSSRIFDPAIKNRMSKILTKPDQELAEFLVGVCSQENWEGIITKIWPNTKYLDVIVTGAMAQYIPTLEYYSGGLPMACTMYASSESYFGINLKPMCKPSEVSYTIMPNMAYFEFLPHNHDGDGAAEASLDETSLVELANVEVGKEYELVITTYAGLYRYRVGDILRVTGFHNSAPQFKFIRRKNVLLSVESDKTDEAELQKAVENASRLFAEQGTRVIEYTSYAETKTIPGHYVIYWELLGRDQSNALMSEEVMAKCCLEMEESLNSVYRQSRVADKSIGPLEIRVVRNGTFEELMDYAISRGASINQYKVPRCVSFTPIMELLDSRVVSAHFSPSLPHWSPERRR

SEQ ID NO: 76 - protein, 595 aa, Arabidopsis thaliana
MTVDSALRSPMMHSPSTKDVKALRFIEEMTRNVDFVQKKVIREILSRNSDTEYLKRFGLKGFTDRKTFKTKVPVVIYDDLKPEIQRIANGDRSMILSSYPITEFLTSSGTSAGERKLMPTIDEDMDRRQLLYSLLMPVMNLYVPGLDKGKALYFLFVKTESKTPGGLPARPVLTSYYKSEQFKRRPNDPYNVYTSPNEAILCPDSSQSMYTQMLCGLLMRHEVLRLGAVFASGLLRAIGFLQTNWKELADDISTGTLSSRISDPAIKESMSKILTKPDQELADFITSVCGQDNSWEGIITKIWPNTKYLDVIVTGAMAQYIPMLEYYSGGLPMACTMYASSESYFGINLKPMCKPSEVSYTIMPNMAYFEFLPHHEVPTEKSELVELADVEVGKEYELVITTYAGLNRYRVGDILQVTGFYNSAPQFKFVRRKNVLLSIESDKTDEAELQSAVENASLLLGEQGTRVIEYTSYAETKTIPGHYVIYWELLVKDQTNPPNDEVMARCCLEMEESLNSVYRQSRVADKSIGPLEIRVVKNGTFEELMDYAISRGASINQYKVPRCVSFTPIMELLDSRVVSTHFSPALPHWSPERRR

SEQ ID NO: 77 - protein, 597 aa, Arabidopsis thaliana
MAVDSLLQSGMASPTTSETEVKALKFIEEITRNPDSVQEKVLGEILSRNSNTEYLKRFDLNGAVDRKSFKSKVPVVIYEDLKTDIQRISNGDRSPILSSHPITEFLTSSGTSAGERKLMPTIEEDINRRQLLGNLLMPVMNLYVPGLDKGKGLYFLFVKSESTTSGGLPARPALTSYYKSDYFRTSDSDSVYTSPKEAILCCDSSQSMYTQMLCGLLMRHEVNRLGAVFPSGLLRAISFLQNNWKELSQDISTGTLSSKIFDHAIKTRMSNILNKPDQELAEFLIGVCSQENWEGIITKIWPNTKYLDVIVTGAMAEYIPMLEYYSGGLPMASMIYASSESYFGINLNPMCKPSEVSYTIFPNMAYFEFLPHNHDGDGGVEATSLVELADVEVGKEYELVITTYAGLYRYRVGDILRVTGFHNSAPQFKFIRRENVLLSIESDKTDEADLQKAVENASRLLAEQGTRVIEYTSYADTKTIPGHYVIYWELLSRDQSNALPSDEVMAKCCLEMEESLNAVYRQSRVSDKSIGPLEIRVVQNGTFEELMDFSISRGSSINQYKVPRCVSLTPIMKLLDSRVVSAHFSPSLPHWSPERRH

SEQ ID NO: 78 - protein, 612 aa, Arabidopsis thaliana
MPEAPKKESLEVFDLTLDQKNKQKLQLIEELTSNADQVQRQVLEEILTRNADVEYLRRHDLNGRTDRETFKNIMPVITYEDIEPEINRIANGDKSPILSSKPISEFLTSSGTSGGERKLMPTIEEELDRRSLLYSLLMPVMSQFVPGLENGKGMYFLFIKSESKTPGGLPARPVLTSYYKSSHFKERPYDPYTNYTSPNETILCSDSYQSMYSQMLCGLCQHQEVLRVGAVFASGFIRAIKFLEKHWIELVRDIRTGTLSSLITDPSVREAVAKILKPSPKLADFVEFECKKSSWQGIITRLWPNTKYVDVIVTGTMSQYIPTLDYYSNGLPLVCTMYASSECYFGVNLRPLCKPSEVSYTLIPSMAYFEFLPVHRNNGVTNSINLPKALTEKEQQELVDLVDVKLGQEYELVVTTYAGLCRYRVGDLLRVTGFKNKAPQFSFICRKNVVLSIDSDKTDEVELQNAVKNAVTHLVPFDASLSEYTSYADTSSIPGHYVLFWELCLDGNTPIPPSVFEDCCLAVEESFNTVYRQGRVSDKSIGPLEIKIVEPGTFDKLMDYAISLGASINQYKTPRCVKFAPIIELLNSRVVDSYFSPKCPKWVPGHKQWGSN

SEQ ID NO: 79 - protein, 612 aa, Arabidopsis thaliana
MPEAPKIAALEVSDESLAEKNKNKLQFIEDVTTNADDVQRRVLEEILSRNADVEYLKRHGLEGRTDRETFKHIMPVVTYEDIQPEINRIANGDKSQVLCSNPISEFLTSSGTSGGERKLMPTIEEELDRRSLLYSLLMPVMDQFVPGLDKGKGMYFLFIKSESKTPGGLPARPVLTSYYKSSHFKNRPYDPYTNYTSPNQTILCSDSYQSMYSQMLCGLCQHKEVLRVGAVFASGFIRAIKFLEKHWPELARDIRTGTLSSEITDSSVREAVGEILKPDPKLADFVESECRKTSWQGIITRLWPNTKYVDVIVTGTMSQYIPTLDYYSNGLPLVCTMYASSECYFGVNLRPLCKPSEVSYTLIPNMAYFEFLPVHRNSGVTSSISLPKALTEKEQQELVDLVDVKLGQEYELVVTTYAGLYRYRVGDVLSVAGFKNNAPQFSFICRKNVVLSIDSDKTDEVELQNAVKNAVTHLVPFDASLSEYTSYADTSSIPGHYVLFWELCLNGNTPIPPSVFEDCCLTIEESLNSVYRQGRVSDKSIGPLEIKMVESGTFDKLMDYAISLGASINQYKTPRCVKFAPIIELLNSRVVDSYFSPKCPKWSPGHKQWGSN

SEQ ID NO: 80 - protein, 595 aa, Capsicum chinense
MAVDSVLSSPLGPPACEKDAKALQFIEEMTRNADAVQQRVLDEILTRNSQTEYLKRFKLDGVSDRETFKSRIPVVTYEDLQPEIQRIANGDRSPILSAHPISEFLTSSGTSAGERKLMPTIKEELDRRQLLYSLLMPVMNLYVPGLDKGKGLYFLFIKSETKTPGGLLARPVLTSYYKSEHFKSRPHDPYNVYTSPNEAILCADSFQSMYTQMLCGLYEREQVLRLGAVFASGLVRAIRFLQLHWPQLAHDIRTGNLNPQITNLSLCERMGKIMRPNPELADFVAGECCKENWEGIITRIWPKTKYLDVIVTGAMAQYIPTLDYYSGGLPKACTMYAASECYFGLNLNPMCKPSEVSYTIMPNMGYFEFLPHDSTTTNSSPTNLVDLVDVEVGKEYELVITTYAGLYRYRVGDILRVTGFHNSAPQFHFVRRKNVLLSIDADKTDEAELQKAVENASKLLREFNTSVVEYTSYADTKTIPGHYVIYWELLMKDLKNSPSDEVLNKCCLAMEESLNTVYRQGRVACNSIGPLEIRVVKNGTFEELMDYAISRGASINQYKVPRCVNFAPILELLDSRVMSSHFSPSLPQWTPERRR

SEQ ID NO: 81 - protein, 593 aa, Glycine max
MAIATCDHDKNAKALQFIEDMTQNTESVQERVLAEILSQNSQTEYLKRFELNGATDRDTFKSKVPVVSYDDLKHDIHRIANGDRSPILCAHPISEFLTSSGTSAGERKLMPTIRQEMDRRQLIFSLPMPVMNQYVTDMDKGKALIFLFTKAEQKTPSGLVARPVSASMYKSDQFKNRPYDPYNVYTSPDEAILCPDSFQSMYTQMLCGLIMRHQVLRVGANFASGLLRSIHLLQLNWAQLSHDISTGTLNPKITDPAIKQRMTQILKPDPELAEFIVKECSGENWERIIPRIWPNTKYVEVVVTGAMAQYVPTLDYYSGGLPLASNIYGSSECFFGINLNPFCNPSDVSYTIMPNMGYFEFLPQDHDDASSSSGSSFTLSRLIDLDDVELGKSYEIVVTTYSGLCRYRVGDILRVTGFHNTAPQFSFVRRKNVLLSIDSDKTDEAELQNAVEKASVLLKEFKTSVVEYTSFADTKSIPGHYVIYWELLMKDSSNAPTTEALEQCCLTMEESLNAVYRQGRVADHSIGPLEIRVVKNGTFEELMDYAISRGASISQYKVPRCVTFTPITELLDSRVESVHFSPSEPHWTPERRR

SEQ ID NO: 82 - protein, 607 aa, Medicago truncatula
MPTSLDYDLSQKNKKTLDFIEDITTHADEIQKKVLAEILNRNANVEYLQRHGLNGHTDSETFKKLLPIITYEDIQNDINLIANGDTSPILTSNPISNFLTSSGTSGGERKLMPATEEEFGRRYLLYSYLMPIMSQFIPDLEKGKGMYLMFIKNESKTPGGIKASPVLTNYYKSSHFLNRPYDPYTNFTSPNETVLCLDSYQSMYSQLLCGLIQNNEVLRVGAVFASGLIRAIRFLEKNWRLLCNDIRTGTLDLLITDDSVREAVMKILKPNKNLADFVEGECNKGSWQGIITRLWPNTKYVDVIVTGTMSQYIPTLDYYSNGLPLVCTMYASSECYFGVNLNPLSKPCHVSYTLIPTMCYYEFLPVNRSNCEVNGSIPPSTTKSLGEKKYQEVVDLVDVKLGQEYELVVTTYAGLYRYKVGDVLKVTGFKNKAPQFSFVCRKNVVLSIESDKTDEVELQNAMKNAVTHLAPFEADVAEYTSYADTTTIPGHYVLYWELNLKGSTKIPHSVYEDCCLTIEESLNSVYRQGRVSDKSIGPLEIKIVEQGTFDKLMDYAINLGASINQYKTPRCVKFAPMVELLESRVMAKYFSPKCPKWVPGHKKWNNE

SEQ ID NO: 83 - protein, 595 aa, Nicotiana tabacum
MAVDSVLSSPLGPPACEKDAKALQFIEEMTRNADAVQERVLNEILTRNSQTEYLKRFKLDGVSDRETFKNKIPVVTYEDLQPEIQRIANGDRSPILSAHPISEFLTSSGTSAGERKLMPTIKEELDRRQLLYSLLMPVMNLYVPGLDKGKGLYFLFIKSETKTPGGLLARPVLTSYYKSEHFKRRPHDPYNVYTSPNEAILCADSFQSMYTQMLCGLYEREQVLRLGAVFASGLVRAIRFLQLHWPQLAHDIRTGTLNPEITDPSICERMGLVMRPNPKLADFVTDECSKENWEGIITRIWPKTKYLDVIVTGAMAQYIPTLDYYSGGLPKACTMYAASECYFGLNLNPMCKPSEVSYTIMPNMGYFEFLPHDPNSSRDSTRNLVDLVDVEVGKEYELVITTYAGLYRYRVGDILRVTGFHNSAPQFHFVRRKNVLLSIDSDKTDEAELQRAVENASKLLKEFNTSVVEYTSYADTKTIPGHYVIYWELLMKDLNNSPSDEVLNKCCLAMEESLNTVYRQGRVACNSIGPLEIRVVKNGTFEELMDYAISRGASINQYKVPRCVSFAPILELLDSRVMSRHFSPSLPQWTPERRH

SEQ ID NO: 84 - protein, 615 aa, Pinus pinaster
MPQAKREEGIESVQESIIIATTERNRKALDFIEHATIHAAEVQAEVLLEILTRNAYTEYLERYQLTGRTDRKSFKERLPVITYEDLQPEILRIANGDMSPILSAHPISEFLTSSGTSAGERKIMPTIHEELKRRTLLYSLLMPVMNQYMKGLDKGKGMYFLFVKSETRTPGGLLARPVLTSYYKSQDFIERPYDPYNVYTSPMEAILCSDSYQSMYCQLLCGLAQNHEVLRVGAVFASGLLRAIRFLEEHWQSLCQDIRSGTVNDEEVTDPCLRESVMKILHPNTQLADLIRTECSKESWQGIITRLWPNARYLDVIVTGAMAQYIKTLDFYSGGLPQVCTMYASSECYFGINLKPLCQPWEVSYTLMPNMAFFEFLPVYRNKNEDAGPVTTATEQPAELVDLVDVKVGQEYELVITTYSGLYRYRVGDVLRVTGFHNAAPQFQFVCRKNVMLSIDADKTDEAELHNAVMNAVKHLEPLEATLVEYTSYTDTSTIPGHYVLYWELRTSALPVPPSVFEDCCLTVEESLNSVYRQCRVADKSIGPLEIKVVEMGTFDKLMDYAISRGSSINQYKAARCVKFAPMVDILNSRVSASYFSPRCPKWTAGRTQWGALPR

SEQ ID NO: 85 - protein, 597 aa, Populus trichocarpa
MAIESVLSPLGPPACEKDAKALQFIEDMTANVDLVQERVLKEILTSNAETEYLQKYHLNGATDRDSFKSKIPMVTYEDLQPQIQRIANGDKSPILSSHPISEFLTSSGTSAGERKLMPTIEEEMDRRQLLYSLLMPVMNLYVPGLDKGKGLYFYFIKAEAKTPGGLVARPVLTSYYKSKQFKTRPYDPYNVITSPNETILCVDSFQSMYSQMLCGLIMREEVLRVGAVFASGLLRAIRFLQLNWKELANDISTGSLNPKVTNPSIRECMAKILKPNQELAEFITKECSDENWERIITRIWPNTKYLDVIVTGAMAQYIPTLDYYSGGLPKPCTMYASSECFFGLNLRPMSEPSEVSYTIMPNMGYFEFLPHDPSAPAFSRESPPRLLDLADLEVGKEYELVITTYSGLNRYRVGDILLVTGFYNKAPQFRFVRRKNVLLSIESDKTDEAELQKAIDNASLLLREFNTSVVEYTSYAETKIIPGHYVIYWELLVKDPANSPTEEVLNQCCLAMEESLNSVYRQSRVADNSIGPLEIRVVKNGTFEELMDYAISRGASINQYKVPRCVSFTPIMELLDSRVVSKHFSPSVPHWTPERRS

SEQ ID NO: 86 - protein, 596 aa, Populus trichocarpa
MAVDNALSSPLGPPACEKDAKALQFLEEMTRNADSVQEDVLAKILTQNSEVEYLKRFNLDGAIDRETFKSKIPMIRYEDLQPEIQRIANGDRSSILSAHPISEFLTSSGTSAGERKLMPTIKQELDRRQLLYSLLMPVMNLYVPGLDKGKGLYFLFVKSETRTPGGLLARPVLTSYYKSDHFKTRPYDPYNVYTSPNEAILCADSFQSMYTQMLCGLLEREQVLRVGAVFASGLLRAIRFLQLHWRELSDDIESGMLNKKITDPTVKDCMVNILKPNPKLAEFVRMECGKENWEGIITRIWPNTKYLDVIVTGAMAQYIPTLDYYSGGLPKACTMYASSECYFGLNLNPMCKPSEVCYTIMPNMAYFEFLPHEPAGISQDSTPKLVDLADVELGKEYELVITTYAGLYRYRVGDILRVTGFHNSAPQFHFVRRKNVLLSIDSDKTDEAELQTAVENASQLLREFNTSVVEYTSHADTKTIPGHYVIYWELLVKDSANSPGDEVLNQCCLAMEESLNSVYRQGRVADNSIGPLEIRVVKNGTFEELMDYAISRGASINQYKVPRCVNFTPIMELLDSRVVSKHFSPALPRWAPERRR

SEQ ID NO: 87 - protein, 596 aa, Populus trichocarpa
MAVDNALSSPLGPPACEKDAKALQFIEEMTRKTDSVQEDVLAKILIQNAEVEYLKRFNLDGATDRETFKSKLPTIRYEDLQPEIQRIANGDRSSILSTHPISEFLTSSGTSAGERKLMPTIKQELDRRQLLYSLLMPVMNLYVPGLDKGKGLYFLFVKSETRTPGGLLARPVLTSYYKSDHFKTRPYDPYNVYTSPNEAILCADSFQSMYTQMLCGLLEREQVLRVGAVFASGLLRAIRFLQLHWRELADDIESGMLNKEITDPSVKDCMVKILKPNPKLAEFVRMECSKENWEGIITRIWPNTKYLDVIVTGAMAQYIPTLDYYSGGLPLACTMYASSECYFGLNLNPMCKPSEVCYTIMPNMAYFEFLPHDPNGFTHDSTPKLVDLADVELGKEYELVITTYAGLYRYQVGDILRVTGFHNSAPQFHFVRRKNVLLSIDSDKTDEAELQKAVENASQLLREFNTSVVEYTSYADTKTIPGHYVIYWELLVKDLANSPSDEVLNQCCLAMEECLNSVYRQGRVADYSIGPLEIRVVKNGTFEELMDYAISRGASINQYKVPRCVNFTPIMELLDSRVVSKHFSPALPYWTPERRR

SEQ ID NO: 88 - protein, 608 aa, Populus trichocarpa
MPEEAPMKNLVCEKSRKALQFIEDVTRNADEVQRKVLAEILSRNANVEYLQRYGLNGNKADREAFKKVMPVVSYEDLKPDIDRIANGDTSQIICSQPISEFLTSSGTSAGERKLMPTIEEELGRRSLLYSLLMPVMNQFVPGLDRGKGMYFLFIKSETKTPGGLLARPVLTSYYKSSYFRDRPYDPYTNYTSPNETILCQDSYQSMYSQLLCGLYQNYDVLRVGAVFASGFIRAIKFLEKHWILLCNDIRNGTIDPKISDPSVREAVLKILKPNQKLADFIEAECTRESWKGIITRLWPNTKYIDVIVTGTMSQYIPTLDYYCDGLPLVCTMYASSECYFGLNLNPLSKPSEVSYTLIPTMAYFEFLPVNRKNGLINSITAPTSLDQKKDQELVDLVDVKLGEEYELVVTTYAGLYRYRVGDILRVAGFKNKAPQFNFVCRKNVVLSIDSDKTDEVELQNAVQNAANHLLPFGASLTEYTSYADTSKIPGHYVLFWEICLSGTTPIPPSVFEDCCLAIEESLNSVYRQGRVSDKSIGPLEIRITERGAFDKLMDFALSQGASINQYKAPRCVKYAPIIELLNSRVVSNYISPKCPKWVPGHKQWCTPN

SEQ ID NO: 89 - protein, 611 aa, Populus trichocarpa
MPEAPKNTLKPSDYNLAEKNKKSLQFIEDVTSNADEAQKKVLEEILSRNAHVEYLQRHGLNGQTNRETFKKVMPVINYEDIQPDINRIANGDASPILCSKPISEFLTSSGTSGGERKLMPTIVEELGRRSLLYSLLMPVMSQFVPDLEKGKGMYFLFIKSEAKTPGGLVARPVLTSYYKSTHFKDRPYDPYTNYTSPNETILCPDSYQSMYSQMLCGLCQHKEVLRVGAVFASGFIRAIRFLEKYWKFLANDIRTGIIDPQITDPSIREAVMKILKPDAKLADFIEAECSKESWQGIITRLWPNTKYVDVIVTGTMSQYIPTLDYYSNGLPLVCTMYASSECYFGVNLNPICKPSEVSYTLIPTMAYFEFLPVNRNNGGINSVSRPKSLKEKEQQELVDLVDVKLDQEYELVVTTYAGLYRYRVGDVLRVVGFKNKAPQFSFICRKNVVLSIDSDKTDEVELQSAVKNAVNHLIPFDATLAEYTSYADTTTIPGHYVLFWELSLSGSTPIPPSVFEDCCLTIEESLNSVYRQGRVSDKSIGPLEIKIVEPGTFDKLMDYAISLGASINQYKTPRCVKFAPIVELLNSRAVSRYFSPKCPKWVPGHKQWNKN

SEQ ID NO: 90 - protein, 611 aa, Populus trichocarpa
MPEAPKNTLKTSDYNLAEKNKISLQFIEDVTSNADEVQKKVLEEILSRNAHVEYLQRHGLNGQTNRETFKKAVPVITYEDIQPDINRIANGDTSQILCSKPISEFLTSSGTSGGERKLMPTIEEELGRRSLLYSLLMPVMTQFVPGLEKGKGMYFLFIKSEAKTPGGLVARPVLTSYYKSTHFKDRPYDPYTNYTSPNETILCPDSYQSMYSQMLCGLCQHKEVLRVGAVFASGFIRAIRFLEKHWKLLANDIRTGIIDPQITDPSVREAVMKILKSDPKLADFIEAECSKESWQGIITRLWPNTKYVDVIVTGTMSQYIPTLDYYSNGLPLVCTMYASSECYFGVNLNPICKPSEVSYTLIPTMAYFEFLPVHRNNGVINSVSMPKSLNEKEQQELVDLVDVKLDQEYELVVTTYAGLYRYRVGDVLRVVGFKNKAPRFSFICRKNVVLSIDSDKTDEVELQSAVKNAVNHLIPFDATLAEYTSYADTTTIPGHYVLFWELSLNGSTPIPPSVFEDCCLTIEESLNSVYRQGRASDKSIGPLEIKIVEPGTFDKLMDYAISLGASINQYKTPRCVKFAPIVELLNSRVVTCYFSPKCPKWAPGHKQWSKN

SEQ ID NO: 91 - protein, 598 aa, Ricinus communis
MAVDSGLSSPLGPPACEKDAKALQFIEEMTRNIDSVQEKVLAEILSRNAETEYLERFQLNGATDRDAFKSKVPVVTYEDLQPEIQRIANGDRSNIFSSHPISEFLTSSGTSAGERKLMPTIHEELDRRTLLYSLLMPVMNLYVPGLDKGKGLYFLFVKAETKTPGGLVARPVLTSYYKSEHFKNRPFDPYNVYTSPNETILCPDSFQSMYSQMLCGLIMREEVLRVGAVFASGLLRAIRFLQINCKHLAEDISTGTLNPKISDPSIRECMAKILKPNPELAEFITKECSEENWEGIITRIWPNTKYLDVIVTGAMAQYIPTLEYYSNGLPMACTMYASSECYFGVNLNPMVKPSDVSYTIMPNMAYFEFLPHESSSSALSRDSPPRLVDLADVEVGKEYELVITTYAGLNRYRVGDILRVTGFHNAAPQFRFIRRKNVLLSIDSDKTDESELQKAIENASLLLREFNTSVVEYTSYGDTKTIPGHYVIYWELLIKDPSNSPTEQVLNQCCLAMEESLNSVYRQGRVADSSIGPLEIRVVKNGTFEELMDYAISRGASINQYKVPRCVSFTPIMELLDSRVVSKHFSPSLPQWTPERRR

SEQ ID NO: 92 - protein, 612 aa, Ricinus communis
MPEAPKNSLISSDYNLSEKNRKTLQFIEDVTSNPDEVQKKVLEEILTRNARVEYLQKHGLNGYTDRESFKKIMPVIAYEDIQPHINRIANGDTSPILCSKPISEFLTSSGTSGGERKLMPTIEEELGRRSLLYSLLMPVMNQFVPGLEKGKGMYFLFIKSEAKTPGGLVARPVLTSYYKSSHFKDRPFDPYTNYTSPNETILCPDSYQSMYSQMLCGLCQRNDVLRVGAVFASGFIRAIRFLEKHWQLLCNDIRTGTVNPQITDLSVREAVMKILKPDPKLADFIAAECSQESWQGIITRLWPNTKYVDVIVTGTMSQYIPTLDYYSNGLPLVCTMYASSECYFGVNLNPLCKPSEVSYTLIPTMAYFEFLPVHRNNGVTNSISMPKSLNEKEQQELVDLVDVKLGQEYELVVTTYAGLYRYRVGDVLRVAGFKNKAPQFNFICRKNVVLSIDSDKTDEVELQNAVKNAVNHLVPFDATLAEYTSYADTTSIPGHYVLFWEITLNGSTPIPPSIFEDCCLTIEESLNSVYRQGRVSDKSIGPLEIKIVEPGTFDKLMDYAISLGASINQYKTPRCVKFAPIVELLNSRVVSSYFSPKCPKWVPGHKQWGNKN

SEQ ID NO: 93 - protein, 612 aa, Thellungiella halophila
MPEAPKNESLEIFDLTLDEKNKRKLQLIEELTSNADQVQRRVLEEILTRNADVEYLRRHDLDGRTDRETFKNVMPVITYEDIQPEINRIANGDKSHILSIKPISEFLTSSGTSGGERKLMPTIEEELDRRSLLYSLLMPVMSQFVPGLDKGKGMYFLFIKSESKTPGGLPARPVLTSYYKSSHFKERPFDPYTNYTSPNETILCPDSYQSMYSQMLCGLCQHQEVLRVGAVFASGFIRAIKFLEKHWTELVCDIRTGVLSSLITDPSVREAVAKILKPNPKLADFVESECKKKSWQGIITRLWPNTKYVDVIVTGTMSQYIPTLDYYSNGLPLVCTMYASSECYFGVNLKPLCKPSEVSYTLIPTMAYFEFLPVHRNTGVTNSINLPKALTEKEQQELVDLVDVKLGQEYELVVTTYAGLCRYRVGDLLRVTGFKNKAPQFSFICRKNVVLSIDSDKTDEVELQNAVKNAVTHLVPFDASLSEYTSYADTSSIPGHYVLFWELCLDGNTPIPPSVFEDCCLAVEESLNTVYRQGRVSDKSIGPLEIKIVEPNTFDKLMDYAISLGASINQYKTPRCVKFAPIIELLNSRVVDSYFSPKCPKWVPGHRQWGSN

SEQ ID NO: 94 - protein, 598 aa, Vitis vinifera
MAVDPILSSPLGPAASEKDAKALQFIEEMTRNADSVQERVLAEILSRNGETEYLKRFKLEGSTVRETFKSKIPVIKYEDLQPEIQRIANGDRSAILSAHPISEFLTSSGTSAGERKLMPTIQEELDRRQMLYSLLMPVMNLYVPGLDKGKGLYFLFVKSETRTPGGLLARPVLTSYYKSEHFKTRPYDPYNVYTSPNEAILCADSFQSMYTQMLCGIYERKQVLRLGAVFASGLLRAIRFLQLNWHQLTHDIRTGTLSPKITDPSVRNCVAGVLKPDPELADLVAGECSKDNWEGIITRIWPNTKYLDVIVTGAMAQYIPTLDYYSGGLPLACTMYASSECYFGLNLNPMSKPSEVSYTIMPNMAYFEFLPHEHSSIPLSRDSPPRLVDLAHVEVGKEYELVITTYAGLYRYRVGDILRVTGFHNSAPQFHFVRRKNVLLSIDSDKTDEAELQKAVDNASKLLREVNTSVVEYTSFADTKTIPGHYVIYWELLVKDSANSPSDELLGQCCLAMEESLNSVYRQGRVADNSIGPLEIRVVKSGTFEELMDYAISRGASINQYKVPRCVNFTPIMELLDSRVVSSHFSPALPHWTPARRR

SEQ ID NO: 95 - protein, 600 aa, Vitis vinifera
MAVDSGLSSPLGPPACEKDAKALQFIEEMTRNPDQVQEKILAEILSQNGETEYLQRFKLAGATDRDTFKSKVPVVTYEDLQPDIQRIANGDRSPILSSHPISEFLTSSGTSAGERKLMPTIHEEWDRRQKLYSLLMPVMNLYVPGLDKGKGLYFLFVKSETKTPSGLVARPVLTGYYRSEHFKKRPYDPYNVYTSPDEAILCVDSFQSMYAQMLCGLLMHKEVLRVGAVFASGLLRAIRFLQVHWQQLAHDISTGILNPKITDPSVREGLAGILKPSQELADFIIQECSGGNWERIITRIWPNTKYLDVIVTGAMAQYIPTLDYFSGGIPLACTMYASSECYFGLNLKPMSKPSEVSYTIMPNMGYFEFLPHDPSAPPLSRDSPPRLVDLADVEVGKEYELVITTYAGLCRYRVGDILQVTGFHNSAPQFQFIRRKNVLLSIDSDKTDEAELQKAVENASLLLREFNTSVVEYTSFADTKTIPGHYVIYWELLVKDPSNSPTDTVLKQCCLAMEESLNTVYRQGRVADNSIGPLEIRVVKSGTFEELMDYAISRGASINQYKVPRCVNFTPIMELLDSRVLSTYFSPAAPHWTPERRRTD

SEQ ID NO: 96 - protein, 613 aa, Vitis vinifera
MPEAPKKSFKATGHDYCLAEKNKKALQFIEDVTTNADQVQKRVLAEILTRNAHVEYLHRHGLGGHTDRDTFKKLMPVITYEDLQPDITRIANGDTSLILCSNPISEFLTSSGTSGGERKLMPTIEEELERRSLLYSLLMPVMSQSVQGLEKGKGMYFLFIKSEAKTPGGLVARPVLTSYYKSSHFRERPYDPYTNYTSPNETILCPDSYQSMYSQMLCGLVQNKEVLRVGAVFASGFIRAIRFLEKHWTLLCRDIRTGTIDQQITDPSVREAVMRVLKPDPKLADFVEGECRKESWQGIITRLWPNTKYVDVIVTGTMSQYIPTLDYYSNDLPLVCTMYASSECYFGVNLNPLCKPSEVSYTLIPTMAYFEFLPVHRNNGTNSISVPKSLNDKEQQDLVDLVDVKLGQEYELVVTTYAGLYRYRVGDVLRVAGFKNKAPQFNFVCRKNVVLSIDSDKTDEVELQAAVKNAVNHLMPFDATLTEYTSYADTTTIPGHYVLYWELSLRGSTPIPPSVFEDCCLTVEESLNSVYRQGRVSDKSIGPLEMKIVESGTFDKLMDYAISLGASINQYKTPRCVKFAPIIELLNSRVVSNYFSPKCPKWIPGHKQWCNKN

SEQ ID NO: 97 - protein, 614 aa, Vitis vinifera
MPEAPKNRGNGAGLGVEGGILDDKNIRALEFIEDVTMNAKEVQMQVLSEIITRNSNVEYLQRHGLNGRVDADTFKKIVPVVTYEDMLPDIERIANGDMSPILCSKPISEFLTSSGTSGGERKLMPTIEEELGRRSLLYSLLMPVMNQSVPGLDEGKGMYFLFVKSEAKTPGGLMARPVLTSYYKSSYFRDRPYDPYTNYTSPNETILCPDSYQSMYSQLLCGLCQNKEVLRVGAVFASGFIRAIRFLEKHWVLLCKDIRAGTLDSQINDPSVREAVKRILKPNPELADFIEAECRRESWEGIITRLWPNTKYIDVIVTGTMSQYIPTLDYYSNGLPLVCTMYASSECYFGLNLNPLCKPSEVSYTLIPTMAYFEFLPVNRKNGFTNVSESAPLNEKEHQELVDLVDVKLGQEYELVVTTYAGLYRYRVGDILCVAGFKNKAPQFKFICRKNVALSIDSDKTDEFELQNAVKNAADHLLQFDASVTEYTSYADTSTIPGHYVLYWEIGLSGATPIPPSVFEDCCLIMEESLNSVYRQGRASDKSIGPLEIRIVEGGTFDKLMDYALSQGASINQYKTPRCVKYAPIIELLNSRVVSNYFSPKCPKWVAGHKQWCT

SEQ ID NO: 98 - protein, 591 aa, Arabidopsis thaliana
METVEAGHDDVIGWFEHVSENACKVQSETLRRILELNSGVEYLRKWLGTVDVEKMDDYTLETLFTSLVPIVSHADLDPYIQRIADGETSPLLTQEPITVLSLSSGTTEGRQKYVPFTRHSAQTTLQIFRLSAAYRSRFYPIREGGRILEFIYAGKEFKTLGGLTVGTATTHYYASEEFKTKQETTKSFTCSPQEVISGGDFGQCTYCHLLLGLHYSSQVEFVASAFSYTIVQAFSFFEEIWREICADIKEGNLSSRITLPKMRKAVLALIRPNPSLASHIEEICLELETNLGWFGLISKLWPNAKFISSIMTGSMLPYLNKLRHYAGGLPLVSADYGSTESWIGVNVDPHLPPEDVSFAVIPTFSYFEFIPLYRRQNQSDICIDGDFVEDKPVPLSQVKLGQEYELVLTTFTGLYRYRLGDVVEVTSFHKGTPKLSFIYRRKLILTINIDKNTEKDLQRVVDKASQLLSRSTRAEVVDFTSHADVIARPGHYVIYWEIRGEADDKALEECCREMDTAFVDYGYVVSRRMNSIGPLELRVVERGTFGKVAERCVGKCGGLNQFKTPRCTTNSVMLDILNDSTIKRFRSSAYD

SEQ ID NO: 99 - protein, 575 aa, Arabidopsis thaliana
MLEKVETFDMNRVIDEFDEMTRNAHQVQKQTLKEILLKNQSAIYLQNCGLNGNATDPEEAFKSMVPLVTDVELEPYIKRMVDGDTSPILTGHPVPAISLSSGTSQGRPKFIPFTDELMENTLQLFRTAFAFRNRDFPIDDNGKALQFIFSSKQYISTGGVPVGTATTNVYRNPNFKAGMKSITSPSCSPDEVIFSPDVHQALYCHLLSGILFRDQVQYVFAVFAHGLVHAFRTFEQVWEEIVTDIKDGVLSNRITVPSVRTAMSKLLTPNPELAETIRTKCMSLSNWYGLIPALFPNAKYVYGIMTGSMEPYVPKLRHYAGDLPLVSHDYGSSEGWIAANVTPRLSPEEATFAVIPNLGYFEFLPVSETGEGEEKPVGLTQVKIGEEYEVVITNYAGLYRYRLGDVVKVIGFYNNTPQLKFICRRNLILSINIDKNTERDLQLSVESAAKRLSEEKIEVIDFSSYIDVSTDPGHYAIFWEISGETNEDVLQDCCNCLDRAFIDAGYVSSRKCKTIGALELRVVAKGTFRKIQEHFLGLGSSAGQFKMPRCVKPSNAKVLQILCENVVSSYFSTAF

SEQ ID NO: 100 - protein, 591 aa, Oryza sativa
MLEKKATRSTRVDGVSGEAVIEEFERVTRDAANVQRETLRRILAENGGVEYLRGLGLAGATDPATFRARVPLATHADLEPYIDRIADGDASPVLTAKPATSISLSSGTTQGKRKYLLFNEELVKSTMQIYRISYAFRNREFPVENGKALQFIYSSRETRTKGGLTATTATTNVYRSEEFKATMRDIQSQCCSPDEVIFGPDFAQSLYCHLLAGLLAAGDVQIVSATFAHSVVLAFQTFERAWEDLCADIRRGEVSPSRVTSPAVRRAMAALLAAPNPGLADEVARKCAALSNWYGVIPALWPNARYVYGIMTGSMEHYVKKLRHYAGGLPLVAAEYGASEGWVGANVEPGTPPERATFTVLPDIAYFEFIPLKPVAGDGGYAEAEPVGLTEVAAGELYEVVMTTFAGLYRYRLGDVVKVAGFYNATPKLKFVCRRNLMLSINIDKNSEQDLQLAVDAAARAVLAGEKLEVVDYTSHADVSSDPGHYVVFLELNAADPAAVDGDVMQACCDELDRAFADAGYVGSRKSGAIAPLELRVLQRGTFQKVLRHYLSLGAPVSQFKSPRCVSRSNSGVLQILAGCTVNVFFSSAYD

SEQ ID NO: 101 - protein, 581 aa, Oryza sativa
MTICSCEETINEFEMLTRDAARVQKDTLKKILEINASAEYLQNFGLGGRTDAESYKSCIPLCVHNDIEPYIQRIVDGDTSPVVTGEPITNLSLSSGTTHGKPKFIPFNDELLETTLQIYRTSYAFRNREYPIGQGKALQFVYGSKQVITKGGILATTATTNLYRRQRYKEGMKDIQSQCCSPDEVIFGPDFHQSLYCHLLCGLIYSEEVHSVFSTFAHSLVHAFQTFEEVWEDLCTDIRDGVLSKKVTAPSIREAVSKILKPNPELADSIYKKCIGLSNWYGVIPALWPNAKYVYGIMTGSMEPYLKKLRHYAGNLPLISADYGASEGWVGSNIDPTVPPEQVTYAVLPQVGYFEFIPLEKPIGEETENSASIHYIESDPVGLTEVEVGKIYEVVITNFAGLYRYRLGDVVKIARFHNSTPELQFICRRSLVLSINIDKNTEKDLQLAVEEASKFLEGEKLEVMDFTSFVERSSDPGRYVIFWELSGDASDEVLSSCANALDLAFIDAGYTGSRKIKTIGPLELRILRKGTFKEILDHFLSLGGAVSQFKTPRFVNPSNSKVLQILSRNVTQSYFSTAYGF

SEQ ID NO: 102 - protein, 613 aa, Oryza sativa
MLEKEGKLIMSREDEEIMAWFERTTRDAADVQRETLRRILAENAGVEYLRELGLAGLTDAGSFRARVPVVTHADLDPYIQRVADGDASPVLTAKPVTAISLSSGTTQGKRKRLLFNDDLLRSSIRFFHASYAFTNRAFPVEDGRVLQFMYGSRHETTKGGLTATTVMTNLLRSEEFTASMAARSRPRLPSCSPSEVVFSPDFDESLYCHLLCGLLLAGEVRAVSASFAHSIVVALQALERVWRELCADIRRGAASPARVTTPAVRRAVAPILAAPNPALADALERRCAALGDWSGVIPALWPNARYVQATMTGSMEHYVKKLRHYAGGVPLVSGNYASSEGVIGINAEQHAPPESVVFTVLPDAAYFEFIPLKPPCTDAAADDDNPAAAGSSCYVDADDANPVGLTDVVVGEHYEVVMTTFTGLYRYRLGDVVKVAGFHHATPKLRFVCRRSLILSINVDKNSEHDLQLAVDSAAKILAGDGENHKQLEIADYTSHADTSSDPGHYVVFWELNGGGEEDGGGVLQRCCDEMDRAFGADAGYAQSRKTCAIGALELRVLRRGAFQEVLRHYVAGGSSAGQFKMPRCVAPSNAGVLRVLKDNTINIFFSTAYDYD

SEQ ID NO: 103 - protein, 595 aa, Populus trichocarpa
MEPKNTNGSSRSYEHDIISWFEDISKKAGQVQTETLRRILELNWGVEYLNKWLGDINIQDMDASALESLYTSLVPPASHADLEPYISRIADGDTVPLLTKQPITLLSLSSGTTDGRQKFVPFTDHSARTTLQIFSLAAAYRSRVYPTREGGRILEFIYSSKQFKTKGGLTAGTATTHYYASEEFKIKQEKTKCFTCSPQEVICGGDYEQSTYCHLLLGLFFCDQVEFITSTFAYSIVQAFTAFEDVWRDICNDIKHGTLSERINLAKMRKAVLSIISPNPSLASKIEENCKELETQNWLGLITKLWPNSKYVYSIMTGSMQPYFKKLRHYAGGLALVSADYGSTESWIGANVDPYLPPEDVTFAVIPTFSYYEFMPLYRENHYCGSAIDDFIEDEPVPLSKVKVGQEYEIVLTTFTGLYRCRLGDVVEVAGFHKGTPKLNFICRRKLILTINIDKNTEKDLQLVVEKGSQLLMSKARAELVDFTSHAELETQPGHYIIYWEIKGDVEEEVLGECCKKMDASFVDHGYVVSRRTKSIGPLELCIVKTGTFKKILEYFIGNGAALSQFKTPRCTSNHGLLKILNGSTIKRLYSTAYS

SEQ ID NO: 104 - protein, 576 aa, Populus trichocarpa
MLEKKMEGINTDKVIEEFEALTEDAGMVQRETLKKILEENGSAEYLLNSGLNGRTDPESFKSCVPLVTHKDLEAYIYRIADGDPSPILTGKPIPDMSLSSGTTQGRRKLVPFNDELMENTLQIYRTSFAFRNREFPLEKGKSLQFVYSSKPWKTKGGLGAGTATTNIFRNSKYKNGMKAIQFQCCSPDEVIFGPDFHQSLYCHLLCGLLFREEIQFVFSTFAHSILLAFRTFEQVWEELCNDIRDGELSSRVTAPSVRIAMSKLLKPSPELADLIYKKCSGLSNWYGLIPELFPNAKYIYGIMTGSMEPYLKKLRHYAGELPLMSADYGSSEGWVAANVNPKLPPELATFAVLPNIGYFEFIPLNNNAECLYMEPKPVGLTEVKIGEDYEIIVTTFAGLYRYRLGDVVRVMGFHNTTPELKFVCRRNLVLSINIDKNTEKDLQLSVEEAGKLLAEEKLEIVDFSSLVDVSTDPGHYVIFLEISGEPSEEVLRECCNCLDRSFVDPGYVGSRKVKAIGPLELRVVWRGTFQKILEHYLGLGTVVSQFKTPRCVGPMNSKVQQILCNNVAKTYFSTAF

SEQ ID NO: 105 - protein, 556 aa, Ricinus communis
MTKNAERVQKETLKKILEENGSAEYLQNLGLDGRTDPESFKICVPICTHGDLEPYIQRIADGDSSPVLTGKPITTISLSSGTTQGKPKYVPFTDQLLDNTLQIFRTSFAYRNREFPLENGKALEFVFSSKQGKTKGGLAAGTATTNLFRNPNYKTALEELQFKSCSPREVIFGSDFHQSLYCHLLCGLIFREDIQFVFSTFAHSIVLAFRTFEQVWEELCDDIRNGELSSRITAPSIRTAMSHLLKPNAELADLIHTKCSGLSNWYGLIPELFPNAKYIYGIMTGSMEPYLKKLRHYAGELPLLSADYGASEGWIAANVNPLLPPELATFAVLPDIGYFEFIPLRRNGDHIYSEPKPIGLSDVKIGEEYEILVTNFAGFYRYRLGDVVKVMGFHNSTPELKFVCRRSLLLSINIDKNTEKDLQLVVEEAAKLLADEKLEVVDFSSLADRSTDPGHYVIFWEISGEPTAEVLQECCNCLDRSFLDAGYVTSRKVKAIGPLELRVVHRGTFQKILDHYLGLGAAVSQFKTPRCVGPANNVVSQILSNNVAKSYVSTAF

SEQ ID NO: 106 - protein, 603 aa, Sorghum bicolor
MPEKKTTTTTLLQQQQQQQQAAFCGEAVIAEFESLTRDAAAVQRDTLRRILGDNATAEYLRCRGLAGRTDAASFRACVPLATHADIEPYITRIADGDTSALLTANPITSISLSSGTTQGKRKYLPFNQELVKSTMQIYRTSYAFRNRAFPVEDGKALQFIYGSRQFTTTGGLTATTATTNVYRSEEFMPTMRAIQSQVCSPEAVIFGADFAQSLYCHLLCGLLYADEVRIVSATFAHSLVLAFQTFERVWEDLCADIRAGSLSQTRVTAPAVRRAVEALLTGPNPALADEVVRRCAGLSNWYGVIPALFPNARYVHGIMTGSMEHYVKKLRHYAGGLPLVAAEYGASEGWVGANVEPETPPESVTFTVLPNIAYFEFIPLKATSCCHGGADDDDTSYAEAEPVGLTEVAVGEHYEVVVTTFAGLYRYRLGDVVKVAGFYNSTPKLKFVCRRNLMLSINIDKNSEQDLQLAVDSAAKILAAEKLEVVDYSSHAEVSRDPGHYVVFWELNADGNDDVLQSCCDELDRAFTDPGYVGSRKASGIGPLELRVLQRGTFQKVLRHYLSLGAPVSQFKSPRCVGRSNNSGVLQILSANVVKVFFSAAYD

SEQ ID NO: 107 - protein, 601 aa, Sorghum bicolor
MSGKKAGEFSVEEVIAEFERLTLNAAAVQRETLRRILDENAGVEYLQRHGLAGRSDPDTFRACVPLATHDDLEPFIVRVADGDTSPVLTAKPITSISLSSGTTTQGKRKYLPFNDELFKLTMHVYRTSFAFRNRAFPVEGGGKALQFVYGSRQFTTKGGLTAATATTHLYRNEEYRAAVRDIQLPCCSPDEVVFVAADLAQSLYCHLLCGLLFADEVRTVFAMFGHNLVLAFQTLERVWEELCHDIRHGALSPARVAEPALRQAVSALLAPPNPALADEVARRCAEARLNGWRGVVPALWPNARYVHTIVTGSMEHYVRKIRHYAGGLPLVAMDYGASEGMVGANVEPEVPPDSATFAVLPNIAYFEFIPLKTNDGGGGAACTDTGTSYNTEADPVGLTEVTVGEHYEVVMTTFAGLYRYRLGDVVKVAGFYNSTPKLKFVSRGSIGPTLCINVDKNTEQDVQLAVDGAAEILAARNTSLEVVDYTSHADVSSDPGHYVVFWELSGEADVDDDVLQRCCDELDRRFVDAGYVSSRKTRAIGPLELRVLRRGTFQKVLHHCLSLGAPANQFKLPRCVARSNSGVLQILSDNAVKIFFSTAYD

SEQ ID NO: 108 - protein, 581 aa, Sorghum bicolor
MPICSCEETIHEFEMLTRDAGRVQKDTLKKILELNADAEYLKKFGLNGRTDVESYKSCIPLCVHSDLEPYIHRIADGDSSPLLTGKPVTSLSLSSGTTQGKPKFLPFTDELLETTLQIFQTSYAFRNRKYPIGRGKALQFIYGSKQVVTKGGILATTATTNLYRRARYKEGMKDIQSQCCSPDEVVFGPDFNQSLYCHLLCGLIYSDEVHQVFSPFAHSLVHAFQTFEEVWEDLCADIRGGVLSEKVTVPSIREAVTKILKPNPELADLIYKKCMGLSNWYGVIPALWPNAKYVYGIMTGSMEPYLKKLRHYAGHLPLISADYGASEGWVGANINPTLPPEQVTYAVLPQTGYFEFIRLEKPEGEETENSASIHYIESEPVGLTEVEVGKIYEVVITTFGGLYRYRLGDIVKVAGFHNSTPELRFICRRSLVLSINIDKNTEKDLQLAVEEAAKLLDAEKLEIVDFTSFVEKSSDPGRYVIFWELSSDASEDVLRSCANCLDLAFVDAGYMGSRKIKAIGPLELRILKKGTFKEILDHFLSLGGAVSQFKTPRFVSPLNVKVLQILNRNTTGSYFSTAYGL

SEQ ID NO: 109 - protein, 592 aa, Vitis vinifera
MESAAGAESNGEHEIIGWFEDVSENTGYVQTQTLCRILELNSGVEYLKKWLGDINVQEMEASALESLYTSLVPLASHADLETYIQRIADGDTSPILTNQPITTLSLSSGTTEGRQKYVPFTRHSSQTTLQIFQLAAAYRSRVYPITPGRRILEFIYSSKQFKTKGGLIAGTATTHYFASEEFKIKQEKTKSFTCSPEEVISSGDYKQSTYCHLLLGLHFHDEVEFITSTFAYSIVQAFRTFEELWRNICSDIREGIVSSRISLPKVRKAVSDIISPNPGLASWIEASCKELEDKDWFGLIPKLWPNAKYVYSIMTGSMQPYLKKLRHYAGDLPLVSADYGSTESWIGANIDPSSPPENVTFAVIPTFSYFEFIPLYRQNQNCSSSIDDFIEDEPVPLSQVKIGQEYEIVLTTFTGLYRYRLGDVVEVAGFHKGTPKLNFICRRKLILTVNIDKNTEKDLQSVVEVGSQLLGKTKAELVDFTSHADLVKQPGHYIIYWEIKGEADDKVLSECCNEMDACFVDQGYIVSRKTHSIGPLELCIVERGTFKKILDHFIGKGAALSQFKTPRCTADEVLLRILNVCTIKRFHSTAYG

SEQ ID NO: 110 - protein, 583 aa, Vitis vinifera
MLEKMEEFKAEKVIEEFEELTKDAGRVQRETLKKILEDNASAEYLQKQGLNGRTDPESYQACVPLVTHADLVPYIKRIADGDTSPVLTGKPIKTMSLSSGTTQGKQKYVPFNDELLETTLQIYRTSFAFRNREFPVRNGMALQFIYGSKQFKTEGGLFAGTATTNVFSSSQFKTTMKAIESPCCSPDEVIFGPDFRQSLYCHLLCGLIHHNEIQLVSSTFAHSIVYAFRTFEQVWEQLCADIQDGVLTKDVTVPSIRAVMSKLLKPNPELAEWIYKKCSGLSNWYGVIPALFPNVKYVYGIMTGSMEPYLKKLRHYAGDVPLLSADYGSSEGWIGANINPKLPPELATYAVLPNIGYFEFIPLRGSAEEDRQDKIQSSFESKPVGLTEVKIGEEYEIIVTNFAGLYRYRLGDVVKIAGFHNMTPELQFVCRRNLLLTINIDKNTEKDLQLAVEAAAEVLAPEKVEVIDFTSQVDKSTDPGHYVIFWEISGEVSVEVSSECCNCLDRSFVDAGYISSRKVNSIGPLELKLVRRGTFQKILDHYLGIGGVLSQYKTPRCVNPNNNMVLQILYSNVVKSHFSTAFG

SEQ ID NO: 111 - protein, 583 aa, Zea mays
MTICSSEEIIDEFELLTRDARRVQQDTLRKILELNGDAEYLNRFNLGRRTDSKSFKSCIPLCVHSDIESYIQRIADGDDSPVLTGKPITSLSLSSGTTQGKPKFLPFNDELLESTFQIFRTSYAFRNREYPIVNGKALQFVYGSKQVFTQGGILAATATTNLYRSQRFKEAMKDVMTQCCSPDEVIFGPDFHQSLYCHLLCGLINSDEVQFVFSPFAHSLVHAFHSLEEVWEDLCADIRDGVLSKRVTAPSIRQAVSKILRPNPELASSIYIKCQSLSNWYGVIPTLWPNVKYIYGIMTGSMEPYLKKLRHYAGHLPLLSADYGASEGWVGSNINPTLPPEEVTYAVLPNIAYFEFIPLEKPKWEETEICSSVHYIESEPVGLTEVEVGKIYEVVITNFAGLYRYRLGDIVKIAGFHNATPELQFICRRSLVLSVNIDKNTEKDLQLAVEAAEKLLAAEKLEVVDFTSLVDRSSEPGHYVIFWELSSDDGASEDVLSGCASCMDLAFADAGYVGSRKTQTIGALELRVLRKGAFAQVMNHYLSLGGAVSQFKTPRFVSQSNSKVLQILSRNVTRSYFSTAYGL

SEQ ID NO: 112 - protein, 574 aa, Solanum lycopersicum
MLEKIEMKFDPEEVIEEFEALTKEAGKVQEETLKKILEENGSTVYLQQWGLNGRTDPEIFKSCVPLVTHKDLEPYIQRIADGDLSPVLTGKPITTISLSSGTTQGRPKFVPFNDELMESTMQIYKTSFAFRNREFPIENGKALQFIYSSKQFKTKGGLAAGTATTNVYRNAHFKKTMRAMQTPCCSPDEVIFGPDFHQSLYCHLLCGLIFRDEVQVVSSTFAHSIVHAFRTFEQVWEELVADIREGVISSRVTVPSMRSAIMKLLKPDPEQADSIYNKCSGLSNWYGLIPVLFPSARYIYGIMTGSMEPYLKKLRHYAGELPLLSADYGSSEGWIGANVNPKLPPELVTYAVLPNIGYFEFIPLRVNLDGLEPTPVGLAEVKLGEEYEIVVTNFAGLYRYRLGDVVKIKGFHNATPELQFICRSNLILSINIDKSTEKDLQLAVEAAARLLVDEKLEVVDFTSHANVATDPGHYVVFWELSGEASDETLQECCNCLDKSFVDAGYVGSRKVNVIGALELRVVKKGTFHKILDHFVGLGGAVSQFKTPRCVGQNNSRLLQILCYDVVKSYFSTAY

SEQ ID NO: 113 - protein, 600 aa, Solanum lycopersicum
MTNINCKDKIETDIIGWFDEVADDSAVVQRRTLRRILEMNHGVEYLKKWIGDIKIEEIDENLLESTYASLVPLASHADIEPFTKRIADGDTTPLLTQQPITNLSLSSGTTDGRQKFVPFTHHSSQTTLQIFKLAAAYRSRIYPIRRGGRILEFIYSSKQCKTKGGIIVGTATTHYYASDEFKIKQQQTKSFTCSPQEVISCGDYKQSTYCHLLLGLYFSHEVEFVTSAFAYSIVEAFRSFEEMWKELCHDIREGSLSSIINIDKVRKSVSGITQPNPELASRIESICVELERADWFSIIPKLWPNAKYVYSIMTGSMMPYLTKLRHYAGELPLVSADYGSTESWIGVNLDPSNPPEKVTFAVVPTFSYFEFIPLYKHKSNYNYQNVNLNSTNDDYIEGNSMPLCQVKSGQQYEIVITTFTGLYRYRLGDVVEVDGFYKKTPKLNFICRRNLILAINIDKNTEKDLQLVVERGARILSKGTRRAELVDFTSHANVTKQPGHYVIYWEIKGEIDEKVLDECCRDMDASFVDHGYVVSRRTKSIGPLELCIVERGTFKKILESYIGNGAALSQFKTPRCTSNKELLNILNVCTIKRFYSTAYG

SEQ ID NO: 114 - protein, 580 aa, Solanum lycopersicum
MKMMVENIEKKFDAEEVIEDFEVLTKDAGRIQEETLEKILKENGGTEYLKQWGLNGRTDVETFKACVPIVGHNDLEPYIQRIADGDLSPILTGKPIETISLSSGTTQGKPKFVPFNDELMDSTMQIFKTSFAFRNREFPIGNGKALQFIYSSKQFKTKGGLAAGTATTNVYRNAQFKKTMNAMSTPVCSPDEVIFGPDFQQSLYCHLLSGLIFRDEVQVVSSTFAHSIVHAFRTFEQVWEELVVDIREGVLSSRVTVPSIRLAMSKLLKPDPELAETIYSKCSSLSNWYGLIPELFPNTKYIYGIMTGSMEPYLKKLRHYAGELPLLSADYGSSEGWVGVNVNPKFPPEMVTYAVLPNIGYFEFLPLEENLVGVEQANSPVGLTEVKLGEEYEIVFTNFAGLYRYRLGDVVKIKGFHNGTPELQFVCRRNLLLSINIDKNTEKDLQLAVEAAGKHLVDEKLEVMDFTSHVNVSADPGHYVIFWELSGEATDEILQECCNCLDKSFLDAGYVSSRKVNAIGALELRIVKRGTFHKILDHFVGLGGAVSQFKTPRCVGPKNSSLIQILSSNVVKSYSSTAFC

SEQ ID NO: 115 - protein, 571 aa, Glycine max
MLEKVEEFNMDKVIQEFELLTRDAERVQRETLKRILEDNASAEYLQSLGLNGRTDPESFKACVPMVTHKELEPYIYRIIDGDASPILTGKPITTMSLSSGTTQGKPKYVPWNDELYETTMQIYQTSFAFRNREFPIKNGKALSFIYGSKQLKTKGGLAARTATSNVFCSAGYKCAMRALQSQCCSPDEVIFGPDFFQSLYCHLLCGLIFREEVEFVSSTFAHSIVHAFRTFEQVWEELCNDIREGVLTRNVTVPSIRMAMSKLLKPNPELANAIHKKCTGLSNWYGLIPELFPNAKYIYGIMTGSMEPYLKKMRHYAGELPLLTADYGSSEGWIAANVNPQLPPEYATYAVLPHIGYFEFIPLLELENTKPLGLTQVKVGQEYEIVMTNPAGLYRYRLGDVVKVMGFHNSTPELKFIRRSSLLLNINIDKNTEKDLQLAVEAAGKLLAEEKLEVVDFSSQVDLSKEPGHYVIFWEISGDASQELLHECCNCLDKSFVDAGYTSSRKVNCIGALELRLVRRGTFQKILDHYLGLGTAVSQYKTPRCVGPTNTRVLQILSENVVNNYLSTAFN

SEQ ID NO: 116 - protein, 613 aa, Glycine max
MPQHQPTLMEPVLSYNNSTNNGNGNSDYDIISWFEDVSQNAGFVQTQLLFQILKQNYGVEYLKKWLGSYNILEMDACALESLFSSVVPLASHADFEPFIQRIADGDTAPLLTQQPITTLSLSSGTTEGRQKFVPFTRHSAQTTLQIFTLAAAYRSRIYPIRQGGRILEFIYSSNRFKTKGGLTVGTATTHYYASEEFNIKQHKTKSFTCSPQEVISGGDYKQSTYCHLLLGLFFSDQVEFITSAFIYSMVQAFTTFEELWREICNDIRDGTLSSRIKSPKMRKAVLDIISPNPNLAAKLEDACKGLEVVDWFGLIPKLWPNAKYVYSIMTGSMQPYLKKLRHYANGLPLVSADYGSTESWIGVNVDPSLPPEDVTFAVVPTFSYFEFIPLHRNEKNFSSGGDDFIEDKPIPLSQIKVGQEYEVVLTTFTGLYRCRLGDVVEVAGFHNGTPKLNFVCRRKLILTINIDKNTEKDLQLVVERGSHILNMTSRGELVDFTSYADVSKQPGHYVIYWEIKGEVEDKILGACCNEMDKSFADHGYVVSRKTNSIGPLELCVLESGTFKKILDSFIANGAALSQFKTPRCTNNHVLLKILNTCTTKKFRSTAYNSSMEQ

SEQ ID NO: 117 - protein, 595 aa, Glycine max
MAVDSAISSPLGPPACEKDAKALRFIEEMTRNADAVQERVLEEILTRNAQTEYLKRFELDGAADRQAFKSKIPVITYEDVQPEIQRIANGDRSPILSAHPISEFLTSSGTSAGERKLMPTIKEELDRRQLLYSLLMPVMNLYVPGLDKGKGLYFLFVKSETRTPGGLLARPVLTSYYKSDHFKTRPYDPYNVYTSPNEAILCSDSFQSMYTQMLCGLIERHHVLRLGAVFASGLLRAIRFLQLNWPELAHDIQTGTLNSRITDPAIRSYMDKVLKSDPELAQFVTQQCSKDNWEGIITRIWPNTKYLDVIVTGAMAQYIPTLNYYSGGGLPLACTMYASSECYFGLNLNPMCKPSEVSYTIMPNMAYFEFLPHDPKPGSTSSKLVELADVEVGKEYELVITTYAGLYRYRVGDILRVTGFHNSAPQFHFVRRKNVLLSIDSDKTDESELQKGIENASKLLSEFNTSVVEYTSYADTTTIPGHYVIYWELLTKDSTNSPSHEVLNRCCLEMEECLNSVYRQCRVADHSIGPLEIRVVRNGTFEELMDYAISRGASINQYKVPRCVNFTPIMELLDSRVVSVHFSQELPHWTPERRR

SEQ ID NO: 118 - protein, 614 aa, Glycine max
MPEAPKHLCHDPKDNLDDDDDDGSSNNNKRALEYIEEVTTNADEIQEKVLAQILSRSANAEYLQRHGLEGRTDRNTFKNIMPVVTYEDLKPDIDRIANGDTSPILCSKPISEFLTSSGTSGGERKLMPTIEEELERRSMLYSLLMPVMDQFVPDLDKGKGMYFLFTKSEAKTPGGLLARPVLTSYYKSSHFKHRKHDPYTNYTSPNETILCHDSYQSMYSQLLCGLYQNEEVLRVGAVFASGFIRALKFLEKHFVCLCNDIRTGTLDAKITDPSVREAVMKVLKPNPTLADFVETECMKGSWKGIITRIWPNTKYVDVIVTGTMSQYIPILDYYSNGLPLVCTMYASSECYFGLNLNPSCDPSEVAYTLIPTMAYFEFLPLDEINGHTNSISQLEQEHLVDLADVKLGQEYELVVTTYAGLYRYRVGDILRVAGFKNKAPQFNFVCRKNVVLSIDSDKTDEVELHNAVKSGAEQLAEFNASLTEYTSCVDTSTIPGHYVLYWEISTNDHTPTIPSSVFGHCCLSIEESLNSVYRQGRVSESIGPLEIKVVENGTFDKLMDFALSQGASINQYKTPRCVTYAPILDLLNSKVLSSYISPKCPNWVPGHKDWCTLH

SEQ ID NO: 119 - protein, 631 aa, Glycine max
MRPYPYVFPGPHVLPAKSTTEVVLIFCPLRYPGPLPLSFPFILSILILPSLIMALQFIEQVTKNTDSVQERVLSEILTQNAETEYLKRFALNGATDRDTFKSKVPVVTYEDLQPDIERIANGDRSPILCAHPISEFLTSSGTSAGERKLMPTIHEEMDRRQLLYSLLMPVMNQYVSDLDKGKALHFLFIKAEAKTPGGLMARPVLTSYYKSEQFRKRPFDPYNVLTSPNEAILCPDSFQSMYTQMLCGLIMRHEVLRVGAVFASGLLRAIRFLQLNWEQLSHDILTGTLNPKITEPSIKERMSKILKPDPELAAFIKSECSGENWERIIVRIWPNTKYLDVIVTGAMAQYIPTLDYYSGGLPKPCTMYASSECFFGLNLKPMSEPSDVSYTILPNMGYFEFLPHDDSSPITLSKDSPPRLVELADVELGKYYELIITTYAGLCRYRVGDILQVTGFHNSDPQFRFVRRKNVLLSIDSDKTDESELQKAVENASELLKEFNTSVAEYTSFADTKSIPGHYVIYWELMMKDSSHPPTNQVLNQCCLVMEESLNSVYRQGRVADNSIGPLEIRVVKNGTFEELMDYAISRGASINQYKVPRCVSFTPIMELLDSRVLSFHFSPAAPHWTPERRR

SEQ ID NO: 120 - protein, 607 aa, Glycine max
MPEAPRDYNLFEQNKKTLEFIEDVTANADQVQKRVLSEILSNNANVEYLKRHDLHGQTDRETFKKLLPVITYEDIQPDINRIANGDTSPILCSKPISEFLTSSGTSGGERKLMPTIEEELGRRSLLYSLLMPVMSQFVPGLEKGKGMYLMFIKSEAKTPGGIVARPVLTSYYKSSYFKDRPYDPYTNYTSPNETVLCPDSYQSMYSQLLCGLCQHKEVLRVGAVFASGFIRAIRFLEKHWPLLCHDIRTGTINNTITDLSVRDAVMKILKPDPRLGDLIQSECGKSSWQGIITRLWPNTKYVDVIVTGTMSQYIPTLDYYSNGLPLVCTMYASSECYFGVNLNPLCKPSEVSYTLIPTMCYYEFLPVNRSNGVSHDSLHTPRSLNEKEQQELVELVDVKLGQEYELVVTTYAGLYRYRVGDVLRVAGFKNKAPQFNFVCRKNVVLSIDSDKTDEVELQNAMKNAVTHLVPFDASVSEYTSYADTTTIPGHYVLYWELSLKGSTPIPPCVFEDCCLAIEESLNSVYRQGRVSDKSIGPLEIKIVEQGTFDKLMDYAISLGASINQYKTPRCVKFAPVVELLNSRVVEKYFSPKCPKWVPGHKQWINQN

SEQ ID NO: 121 - protein, 593 aa, Glycine max
MAIANCDDKNAKTLQFIEDMTRNTDSVQERVLAEILSQNAQTEYLKRFELNGATDRDTFKSKVPVVSYDDLKHDIQRIANGDRSPILCAHPITEFLTSSGTSAGERKLMPTISQETERRQLIFSLPMPVMNQYVADLDKGKALLFLFTKAETKTPSGLVARPVSASMYKSEQFKNRPYDPYNVYTSPNEAILCLDSFQSMYTQVLCGLIMRHQVLRIGANFASGLLRAIRFLQLNWAELAHDISTGTLNPKISDLPIKQRMTQILKPDPELADFIVKECSGENWESIIPRIWPNTKFVEVIVTGAMAQYIPTLDYYSGGLPIASNIYGSSECFFGINLNPFCNPSDVSYTIMPNMGYFEFLPHDHDDDDGALYSGSDSSSRLTDLADVELGKSYEIVVTTYSGICRYRVGDILRVTGFHNSTPQFSFVRRKNVLLSIDSDKTDEAELQNAVENASVLLKEFKTSVVEYTSFADTKSIPGHYVIYWELLMKDSSNAPTSEALEQCCLRMEESLNAVYRQCRVAEHSIGPLEIRVVKNGTFEELMDYAISRGASISQYKVPRCVSFTPITELLDSRVESVHFSPAEPHWTPERRR

SEQ ID NO: 122 - protein, 576 aa, Glycine max
MMTDEELLQKLEDLTKNAQHHHLETLRSILLHNGIVHYLQSFKKGSLLHLDPSTFARVVPLSTYEDYVDYINQMAEGKDDPFLSVDPLRCFFYSSGTSSSTMKPKLIPYFDSSLSKAASFIGHRGSVAVRQRLFPPRPEVNKILWFLYADNITTTKCGLKVMAASTYPLQSGNATPQQLAAFSSPLEVILATNVENQMYCHLLCGLRNLDLIDGIATPYAIGLIKAFGFLESKWEQLCDDLDHGFPCNEISEGAMREAVTNTLGGPQPELANRIRLICEGNNWGGIVYRLWPNIRYIRCVTTGSMKQYYQKLKYYAGEVPILGGDYFASECCVGLNLDIMQPPETTRFVMLPTFAYFEFLPFNINEDNDASKEAVDYSSVEVGKMYEVVVTTYRGYYRYRLGDIVRVVGFYNSSPLVEYVMRAPKTPAEIVTEKDLISAVENFQLALRGAMRIEIVEFASFLDQESMPKQLKVFVEVQEESDFLEDKLEESVRVLRSCISSLESGLGAIYKVQKDKGQLRSLRIFIIRPGAFDQLSELAIKNGTSASQYKPPKIIRNHEVVKLLEKLAFVAVSFDG

SEQ ID NO: 123 - protein, 592 aa, Brassica juncea
MIIISYYNEEEKGKVLEDLTWNVKQIQDDLLKEILTLNSGTEYLQNFLHGSSAKELFKKNLPIVTYKDVKPYIDRVANGESSNIISTLPITNFFNSSGTSGGANKILPSNSKYLDGSAFSTDLLAHVIRKHVKGVERGKGMLFFLTGHDTKTPGGFPIEDGISWYLKSDYFKNRPSTWFYSYTSPDEVMLGSDLKENLYCHLLCGLVQRDEVTRIGSTFASGMVRVIKVLEDSWKELCSNIRSGNLSEWITDSGCRNSVSLVLGGQPRHKLSDEIESICSQKSWKGIMKKLWPQTLCIEAIATGSMAQYVPTLKHYSGDVPLVSTIYASSESMFGINTDPLCQPENTSYTLMPNISYFEFIPTEGGNGDVVDLADVKLGCSYQLLVTNLWGLYRMRIGDIVKVTGFHNKAPKFRVIGRENTLLSIDTDRTTEEYLLKAVNRARLVLESSDLRLVAFTSYADISSSPGHYVIYWEVKTKEEDMKELDEKTFLECCSVMEDTLDEEYMYCRANEFIGPLEIRVVNDGTFDSLMNLSISKGASITQYKYWRQMWLLDSSVLSEHLMCLSHDIWSKKRGRNVCVLSVLSWFLLTIF

SEQ ID NO: 124 - protein, 606 aa, Brassica rapa
MMIPSYDPNDTEAGLQLLEDLTTNADAIQQQVLHQILSQNSETEYLRSFLDGESCNIQENFKNKAPVVNYEDIKPFIQRISDGDSSDILSAQPITELLTSSGTSGGKPKFMPSTAEELDRKTFFYNMLVPVMNKFVNGLDEGKGMYLLFIKPEIKTPSGLQARPVLTSYYKSEQFKNRPFNKYNVITSPNDAILCEDSQQSMYCQLLCGLVQRSDVLRLGAIFASAFLRAVKFLENHFTELCADIRTGTVASWITDSGCRDSVLSILNGPNQELADEIEALFNAKSREGILKRIWPKTKYIEVIVTGSMAQYIPTLEFYSGGLPLVSVMYASSECFFGLNINPLCKPSDVSYTLLPNMAYFEFLPVDDKSHEETHLESRSTDDVSLTDKDRIVDLVSVEIGRYYELIITTFAGLYRYRVGDILKVTGFHNKAPQFSFVERRNVVLSIDTDKTSEEDLMKAVTQAKLNHLQGLFLLTEYTSYADTSSIPGHYVLFWELKPRYDNDPPKLDKKMMEDCCSEVEDCLDYVYRRCRNKDRSIGALEIRVVSLGTFDALMDFSISQGSSVNQYKTPRCVKSGGALQILDSRVIGRFFTKRVPQWEPLGLDS

SEQ ID NO: 125 - protein, 585 aa, Brassica rapa
MSVISVLTEKANDKLKILEDLTSNVKQIQDNVLEEILTLNTNTEYLQRFFHGKFDKEIFKKNVPVGTYEDVKPYIQRVANGEPSNVISTRPITGFLLSSGTSGGAQKIMPWNEKFLDYLTFMYDLRMHVITNYVKGLEKGKAMMFYFTKLESTTASGLPARTASSSYLKSSYFKNRPCNWYYTYTSPDEVILCPDNKQSLYCHLLCGLVQRNEVTRMGSIFASVMVRAIKFLEDSWEELCSNIRSGQLSEWITDPGCRDSVSMVLGGPHPEVANTVEKICNEKCWKGILKRLWPRTKYIETIVTGSMAQYVPTLNYYCNDMLPLVSTIYASSETTFGLNLNPLCKPEDVSYTIMPNVSYFEFIPLDGDENDVVDLADLKLGCSYELVVTNFSGLYRIRVGDILLVTGFYNKAPQLRFIRRDNVVLSIDMDKTNEEDLFNAVNRAKLIINSSGLMLTDFTSHGDISTIPGHYVIYWEVEDKREDKTKHICMELKGDAFSECCLVMEDSFDNVYKRCRFREKTVGPLEIKVVLHGTFDSLMDFFISQGASIGQYKTPRCIGSGKPLELLEKNVVATFFSTGDCSFKN

SEQ ID NO: 126 - protein, 570 aa, Brassica rapa
MKPISNNDETWDATLKDLTSNVKEIQDNVLEEIITPNLKTEYLQRFNMDRFDKKLFKKNVPVVSYEDIKPDIDRVVNGESSDVISARPITGFLLSSGTSGGAQKMMPWNNKYLDNLTFAYDLRMHVITKHVKGLEEGKGMMFLFTKQETKTPSGLLARVATSSYFKSDYFTNRPSNWYYSYTSPDEVILCSNNTQSLYCHLLCGLLQRDEVVRMGSIFASVMVRAIKFLETYWEELCSNIRSGRLSEWITDLGCRSSVSLVLGGPRPDLADTIETICNQSSWKGIVTRIWPNTKYIETVVTGSMGQYVPTLNYYCSDLPLVSTTYGSSETTFGINVDPLCKPEDVSYAFMPNMSYFEFITMDGEKRDVVDLHDVKIGCTYEPVVTNFAGLYRMRVGDVLLVTGFYNNAPQFRFVRRENVVLSIDSDKTNEEDLFKAVSQAKLVLDSSDLFLEDFTSYADTSTFPGHYVIYVEVKAKGGNNHLELNEEVFSKCCSVMEDSLDNVYKRCRFKDGSVGPLEIRVVDKGTFESLMDFFINQGASTGQYKTPRCIKSGKALELMEDRVVAKFFSS

SEQ ID NO: 127 - protein, 607 aa, Brassica rapa
MVIGCGLPSTMAAIMLPKFDPTNSKACLSILEDVTTNAKQVQDSVLEAILSRNAQTEYLKGFLNGQLDKQSFKNNLPVVTYEDYRPYIDRIANGESSDLICDQPIIVLLVSSGTSGGVPKLIPMTAEELEQRMLFSSLHRPLISKQIEGISEGKSLSFFFVTREGKTASGLMVRTMVTCVIKMAGSANKDVWDQVQISPHGLYTCDDTTQSMYCQLLCGLLQRENVSRLGAPFASSFLKVIKFLEDHWKELCSNITTGRVSDWITDPQCLSGVGKFLGAPNPELASLIEKECGKTSWEAIVRRLWPNAKCIEAVVTGSMAQYIPMMDFYCGGLPLVSSFYASSECFLGLNLNTLRKPSDAAYTIIPSMAYFEFIEVEKDHQETSHDPTKNIVDLVDVKVGHDYEPVITTFSGLYRYRLGDVLRVTGFYNNAPEFQVAGRKKVVLSIDMDKTYEEDLLKAVTNAKLLLEPHDLMLIDFTSRVDSSSFPGHYVLYWELGSKVNDAKLEPDAEVMEECCFTMEESLDSIYRKGRKNDKNIGPLEIKVVKSGAFDELMNFFVSRGSSVSQYKTPRSVTNEEALKVLEASVVSKFVSKKTPSWELHELHSSR

SEQ ID NO: 128 - protein, 595 aa, Brassica rapa
MLPRFDPTNPLACMSVLEDVTSNAKQIQDSVLEAILSRNAQTEYLKGFLNGQLDKQSFKKNLPLVTYEDYRPYIDRIADGESSNLICDRPISLFLASTGTSGGYPKLIPLTAEDMEQRILFASLYAPLVFKHIGGLTEGKSLMFYFVTRESETASGLIVRFMLTCVLKSVNPSNIFLWDRVQVSPHEISTCVDTSQAMYCQLLCGLVQRENVARLGAPFASSFLKVINFLEDHWTALCSNIRTGRVSDWITDAQCVSGVSKFLTAPNPDLASLIEKECSKTSWEGIVKRLWPKAKCIEAVVTGSMVQYIPLLEFYGGGLPLISSWYGASECFIGINVDPLSKPCDVSYTIVPSMAYFEFLEVEKDHQETGHNPTKNPVVVDLADVKIGHDYELIITTFSGLYRYRMGDVLRVTGFYNNAPQFYFVGRQKVVLSMDIDKTYEEDLHKAVTSATHLLEPHDLMLIDFTSRVDSSSFPGHYVIYWELGRKLKDAKVEPHRHVLEECCFTIEKSLNSVYRKLRKNDGTVGPLEIKVVRRGAFDELMNLFLSRGSSVSQYKTPRSVTSEEAMKILEEAVVSEFLSTKTPSWEPREMHSGR

SEQ ID NO: 129 - protein, 573 aa, Brassica rapa
MSSIVELSSLEELTLNAEQIQDDLLEKILRLNSNTEYLRRFLHGSNDKELFKKNVPLANYEDVKPYIERVANGEPSDLISGGPVTRFFRSSGTSGGKQKIFPVNDEAIEQLGYVLALRSLVMSKHFSDNGVEQGKTMEFHYTKPESTTPSGLPVAAAFTSFFKSDYFKNRPSKSQYTSPDQVILCPDNKQSLYCHLLCGLSQRDEVVRFGATFAHALVRAIDFLESNWKELCGNIRLGHVSEWITDLGCRSSVSAIIGGPNPELADLIEQECSHKSWEGIVTRLWPKAKRIECVLTGQMAQYIPILDFYCNKLPLVSTVYGSSESIFGFNVDPLCKPQDVSYTFVPNTSYFEFLPVDHEGDMTSIVDLVNVKLGCYYEPVVTTCFGLNRYLIGDILEVTGFYNNTPQFRFVRRKNMVLSVETETTTEDDILKALARATFVLESSNLMLMDFTSSADISTFPGHYVFYWELKGKEVNDVLVLDEKTLMGCCYVLEESFGSTYRLKRRTGLIGALEIRVVEQGTFNSLTDYFISRGSSRAQYKTPLCINSSEASAVLENKVLARFHSEKSPPLDL

SEQ ID NO: 130 - protein, 580 aa, Brassica rapa
MSMWADLSDKLDEKVLEDLTSNVKQMQDDVLKEILTLNANTEYLRPFLHGSSDKELFKKNVPVTTYDDVKLFIDRVANGEPFDVISGKPVTGFSLSSGTSGGKRKMFPCNKKYLENLNFIYCYRSLVISKHFDGLEHGKGMVFNFCVPEQTTPSGLPVSAATTLFFKSDYFKNRPSYWHWSFTSPDEVILCLDNKQSLYCHLLCGIVLRDEVVKVGTAFVSTLLRVITFLEKHWKEICTNIRYGHLSEWITDISCRDSVSKILGEPNPELADLIENECNQKSWEGIIQRLWPKTKFIESIATGQMAQHIPTLEFYSNKLPLISSSYVSSETMFGININPLCKPQDVSYTFMPHFSYFEFLLVDAGDEVEIVDLVDVKLGCHYETLVTNHSGLHRYKMGDIVQVTGFYNNAPQFRFARRGNLVLSVHMEITTDQALLNAVTHAKMVLESSNLMLMDFTGYADISTTPGHYVLYWELKGKYSNDIAKIDDKVLVECCYVVEESLDNFYKEYRKNGSIGALEIRVVQQGTFDSLMEFFISQGASSTQYKTPICIKSTEAIAILERKVRARFFTDKSLSLKFSS

SEQ ID NO: 131 - protein, 570 aa, Brassica rapa
MSLGCDLSVLEELTSNAKQIQDDVLTKILKANTNTEYLSRFLEGSSEKELFKKNVPVVSYEDVKPYIDRVANGEPSDILSGKPITAFFRSTGTSSGEKKIFPANDNFEDILLGLALSSLVMSKHVDGYKQGKVMIFKFIQPISTTPCGLPLAPSITIIMKSKCYRSPGKRSTTPDEIIMCTDPKQSMYCQLLCGLVQRDEVVSVGALFASVLVQIIRFLEKYWKELCSNIRSGHVSDWITDHCCRDSVSTILGEPNPELADLIENECGQESWQGIVSRLWPKTKCVETIVTGIMAQYIPALEFYSDKLPIVSSIYGSSETFFGLNVNPLCKPQHVSYTFLPNMSYFEFIHVDADGEATGEIVDLVDVKSGGYYEPLVTNYSGLYRCRVGDVLHVTGFYNNAPQFRFVRRKNTVLSIFVESTTEEDVLKALDRATVVLESSDLMLTGFTCFGDVSTVPGHYVFYLELKAKVNNDTNVLLLDEKVLVEYCCVMEESLSSFYRSLRRKDGPIGPLEVRVVQQGTFDSLMEFFVSRGASITQYKTPICINSVEASRVLEDKVLARFFSDKSPTI

SEQ ID NO: 132 - protein, 569 aa, Brassica rapa
MSLDCDLTVLEELTSNAKQIQDDVLTKILKANANTEYLQRFLQGSADKELFKKNVPVVSYEDVKPYIDRVANGEPSDVISGEPITAFLVSSGTSSGNQKIFPANNIFFKNIQIFYTLGSLVMSKCFDGYKQGKVIRFTFTHPISTTPGGLPLAPTVTSFTKSEYFRSLPKNSPSPYQIIMCTDAKQSMYCQLLCGLVQRDEVASVGAVFAAVLVQVIHFLENYWKELASNIRFGHVSEWITDLSCRDSVSTVLVEPNPELADLIENVCGKKSWQGIVSLLWPKAKCIEAIFTGSMAQYIPTLEFYTNNELSLVSLRYASSEAFFGLNLEPLSKNVSYTFLPNMSYFEFLDVDGGAEGEIVDLVNVKLGRYYEILVTNFSGLHRCRVGDVLEVTGFYNMAPQLRFVRRKNAALSVHLESTTEEELLKALARATLVLESSDLVLMGFTCYGDISTVPGHYVFYLELKSKVDNNITNVLSLVNKVLVECCCVIEESLNRIYRHFRSKEGSIGALEIRVVQEGTFGSLMDFFVSRGCSITQYKTPICLNSAEALKVLGDKVLARFFNDKSPTI

SEQ ID NO: 133 - protein, 524 aa, Brassica rapa
MNLKSELNDLEELTSNAKQIQDDMLEEILRVSANTEYLRPFLHGSSHKELFKKNVPVVTYEDVKPYIERVANGEPSDIITGEPITHFFLSSGTSGGKRKMFPVNNKYYQKRIFSEDLRCSILSKHIDGAMDGKVITFLNTRALSRTPSGLPVGPREEAVSIFVPFACALVQAIKFLETHWKELCNNIRSGRVSEWITDLGCRDSVSVMLGVPKPELADQIERECCRQGSWEGIITRLWPNIKFIQSVVTGQMSHFIPVLEFYSNKLPLVSMSYSASETLLGINVNPLCKPQDVSYTFLPNMSYFEFLPLDEGNDAEVVDLVNVKLGHFYDPLVTNHYGLYRYRMGDILQVTGFYNKTPQFRFVRRKDMVISVCLETTTEEEIVNAVNCVTTILESEGLILMGFTCKPDISTFPGHYVFYLELKAKNFDGIIKLDDSVMVKCCCVMEKSFNAMYKRFRTTYVSIGALEIRVTQQGTFDSLMEYFISQGASASQYKTPLCINSPQGLAILEDRVIAQFFSDKSPPW

SEQ ID NO: 134 - protein, 583 aa, Selaginella moellendorffii
MDATAILSAIACDEQALGFMEHVTRHVSSVQDYVLQLLLEANAGTDYFQRHGLYGIPTKEEFRRLLPITTYSDMEADFQRLANGDESKTICAARVLEMLTSSGTSGGKQKLFPKSPSYDQEFVALNRVARAALNKKAPYASRGKSLQFFYVRKPGITSGGVTTTSGLSGYFTSPAFRQRKLDPESGYTSPDQVILCVDYQQASYCHLLCGLTQSQEVVSIGAPFASTLVRSLKALKDLWQELCVDIETGRVNDNIVSDLSVKHAVNALLKPDPKLAALVRRECSKSNWRGIVRRLWPRARIIQAIVTGSMQQYVPAIDFFSDGLPIASSIYAASECSTLGVNLSPVCSPYDVRYSPFPCFVYYEFLPVSSSSSSSPRRDDLVQLAEVELGREYELVITTRAGLYRYRVGDVLKVVGFKNSMPQFSFVGRAGVLLSVDTDKTDEVELHTAVTTAAAVMAKRNRGDVRLLDYTSRVNLSSQPGHYVVYWELSLDAAMESLEAELRECCSVMEESLSVVYRRNRREGSVGALEIKVVEPGTFDRIVDHVVFVGQGSIGQYKTPRCARDPAVLRILESSVVESSRAR

SEQ ID NO: 135 - protein, 535 aa, Selaginella moellendorffii
MDPALFRDDIESKTKDAAAVQANLLSQMMELNGETEYLRRYGGRFDSLPIIEYHDVADEVQRIANGDTSPILTAEPVVRFFKSSGTVTGEPKLIPATSKSLELLFRRPVYMMESDVCLGFLFAKPENKSPGGLPVSTTSSMFFKVQGENLEKMFTSPMKLLLAPDINQSLYCQLLCGLIRSEDVTQVFAALAITLVEALRLLEEAWSELADDVQTGTLNSKITDPTLRSSLSLCLRPNLKLAQSIRKECTADNAWCGIVERLWPKTKVIVTITTGGMAPYAPAVRKYGGSVPIVSGDYVCTECVLGFNLDPFCPPESVSFTIHPEYAYYEFLHYPQKLTDGSTVKLVDVKVGEEYELVVSTWSGLYRYKVGDIVRVTGFHNFSPNISFVHRLNAELDIAGERSTEAELQVAVQKSQHCLPASQELVDFTCHQDGQRYLIFWEIKNGDSLNPMILETCCCVLDTSLTERYKQRRENGLIGPLRLCIVRGKTFKALQQYSLEKGINPTQYKTPRCITSPEMIAILQAGITQDCQTPA

SEQ ID NO: 136 - protein, 575 aa, Selaginella moellendorffii
MHSICLKSMEHATKNAAVIQRELLQQILEKNAGTEYLTRHGLDEESNLVDGFHKLPLVEYNDIEADIKRIADGDTGRILCSDPISQFFISSGTTTGRSKLIPVTKEANSRFFRPPLISPAWHRVFTINPDETYLAFWFASKQSLTKGGFKAETVTTSGLNSAHFKRAAASFVTPHKIFQSTSMYQCLYCHLLCGLLRREEVTVVISAFAFALTEAFRVLEQVWSELLEDIEAGSLSSRITDPILRLAMSGIAPPSPELAEQLRREFRSFSMDGIVQRLWPNAKSVVAVTTGAMAPYAPRLRALAGKTPLVCGNYFSSECLIGINLSPASSPATFTVNPEFAYFEFLSYHDGETKLNGLEEQRPVGLTEVTIGEKYEIVVTTRSGLYRYRLGDVVQVAGFFNSSPSLRFLFRRNVVMSVATDKTDEFELQAVVHKASLLLRSSSQLHDFAGYADFSSIPGHYAIFWELNHGGSMDPSTLQDCCELLDVSLNDPYLRGRSSGAIGPLKLCVVRGGSFRELFEQHVARGGSGSQYKSCRCVASKQAIDLLRRNTLQQALSSKFPNPWKLSIKSLELDQ

SEQ ID NO: 137 - protein, 554 aa, Selaginella moellendorffii
MEALINEFEDMCRNAAAVQEEVLGNIVEHNASCEFLQSYNVTDVDSFKAHVPVVGYEDIAAKIQRMADGDPASILCKDPVIAFISSSGTTTEKRNAFPLTTKSCDVKNHAMYKIAAAYIERDFPVGSFPTALAFMYALPCGTLSKSGIPIMPVSNFAFTSQAYKERPSRSTSPDEVIWGPWWESTYCHMLCGLIQRMEVDYIISFFAYTLVYAFNMLEVEWRNLCHDIRTGKLDERVKDVKLRAAVAGVLHEDPDSAGFIEEVCSSKESWDQGIVPQLWPKAKYLHTVVTGGMKPYVPALRKYAGGVHIIGKAYIGSEGVYGINMDPTTEAENVVFTLVPTTLYMEFLRLRDNKLVDSSNLEIGEQYELVITTYSGLYRYKVGDVVRVVSFFHQSPQMAFEYRTSALLSVNLDVTSEQELQNVVRRTCNEANLKIVDFTSQSNQTEQPGYYVIYWELKNKPDYSNHALLNRCCDVLDRSFTSSTYIMGRRSGTIGPLKLVILERGSFGRIMEHAVSNGSAPGQYKTPRCIKSPKVLKILEEGIVSTYRSSKYPR

SEQ ID NO: 138 - protein, 549 aa, Selaginella moellendorffii
MEHATKNAAAIQRELLQQILEKNAGTEYLTRHGLDEESNLVDGFYKLPLVEYNDIEADIKRIADGDTGRILCSDPISQFFISSGTTTGRSKLIPSNSRFFHPPLISLAWHRVFTINPDETYLAFWFASKQSLTKGGFKAETVTTSGLNSAHFKRAAASFCLYCHLLCGLLRREEVTVVISAFAFALTEAFRVLEQVWSELLEDIEAGSLSSRITDPTLRLAMSGIAPPSPELAEQLRREFRSFSMDGIVQRLWPNAKSVVAVTTGAMAPYAPRLRALAGKTPVVCGNYFSSECLIGINLSPASSPATFTVNPEFAYFEFLSYHDGETKLNGLEEQRPVGLTEVMIGEKYEIVVTTRSGLYRYRLGDVVQVAGFFNSSPSLRFLFRRNVVMSVATDKTDEFELQAVVHKASLLLRSSSQLHDFAGYADFSSIPGHYAIFWELNHGGSMDPSTLQDCCELLDVSLNDPYLRGRSSGAIGPLKLCVVRGGSFRELFEQHVARGGSGSQYKSCRCVASKQAIDLLRRNTLQQALSSKFPNPWKLSIKSLELDQ

SEQ ID NO: 139 - protein, 426 aa, Selaginella moellendorffii
MAAVIADFEQSCKDASSNQERVLGRILDDNSSCHYLQRYGSPQTLAAFKAQVPIISYEDVGSEIDKIASGVQGPLLCSYPILHFFASSGTTSANGKIIPLTAENAAASGRATEIANAYRTRCFPSDNGIILGFFYCMDQVETKSGLLVSAASTYALKGERFKATSSKYTTPYEVLVAGSDWRELTYCHWLCALLQRGKVEQIISIFSYTICEAIRMLRAEWREICSDIRAGSLCEGKVTSPNLRQAVLASPVFDGIKGGDPVEAEVISEICSRDSWSGIVLLLFPRTNVMSTVVTGSMKLYVPSLRDYVGDQVPIVGLDYFSSEGAIGINADPRCHPERVVYTMVPTALYYEFLPVDSTSCDNILGLHEVQVGEQYEVVITNFAGLYRYRIGDVVKVDSFFHEVPRLAFSDRRKAVLSVHNEMVSR

SEQ ID NO: 140 - protein, 602 aa, Oryza sativa
MATAAADELALRRLDDATRDARRLQLETLRAILAENAGAAYLRRYIPSDGGAHHLLRSTDLAAAADEFRLLVPVTSYDDYAESIRRVADGDAAPDELSPRPLLCFFLSSGTSSLRPKLIPYLDSPGARAATAAVMQANSALVRRLFPPRPAVSKALWFLYAGEVRKTKGGYEAMAATAWGIRSSGIRGASPVMSACVSPAEVILGADHQQQMYCHLLCGLRRWDAVDCIRAPYAAALARALRLLQSKWRQLCDDLECGTVCADVVTDAAMRGAVQDGVLAGPCPELAGRVRRICERDDWRGVLRQLWPDARYISCVTTGTMEQYFPAIKHFAGEALPVLGTDYLASECAIGINLERTSPPEETTYVLLPRAAYFEFIPFDMDAAGRGAAAAEPVDIAGVEAGKTYELVATTFRGLYRYKVGDVVKIAGFHHSSPRLQFVTRAPPPQEHGEVLTERDVMAAMDTFQLMLKDGGEVIEFAAFIIDGDGGQRRRRCATIAVEVSNGSKLLDHERSAAFLRRCTAPLEGCLGGAYRLSRATGDVAPLEVAVVRPGTFDRLAEAAIRGGAPANQYKPPKIVRHRHLVDVLQSSVVCSSSSITEPAAH

SEQ ID NO: 141 - protein, 589 aa, Hordeum vulgare
MLEKKAGEFSGEMVIAEFERLTRDADIVQQETLRRILAENGATEYLQRLGLAGRTDPASFKECVPLATHADLEPYIDRIVDGDATPILTGKPVTSISLSSGTTQGKRKYLLFNEELVKSTMQIYRTSYAFRNREFPVEDGKALQFIYSSRQFTTKGGLTATTATTNVYRSEEFKATMRVVQSQCCSPDEVIFGADFAQSLYCHLLCGLLSAGQVQMVSATFAHSVVVAFQTFERVWEELCADIRRGALSPTRVTSPAVRQAVSALLAGPNPELADAVARKCAGLSNWYGVIPALWPNAKYVYGIMTGSMEHYVKKLRHYAGGLPLVAAEYGASEGWIGANVEPAVPPESATFTVLPDIGYFEFIPLRPGCTAAPGPNACYGESEPVGLTDVVVGQHYEVVMTTFAGLYRYRLGDVVQVAGFHNATPKLKFVCRRNLVLSINIDKNSEQDLQLAVDAAATKFLAAEKLEVVDYTSHADMSSDPGHYVVFVELNAAAADASADALQGCCDELDRSFADPGYVGSRRSCAIGPLELRVLQRGTFHRVLRHYLSLGAPVSQFKSPRCVARSNAGVLQILAACTAKVFFSAAYD

SEQ ID NO: 142 - protein, 590 aa, Brachypodium distachyon
MDKNKLGYKRSDALQELEMLTVNAKEAQELILTKILERNQASEYLSKFMNGSTNISTFNRNVPVVTYDVVQPYIARISTGEDSSIICGDRIVELLRSSGTSRGEPRLMPAISEDLDRRTYLYSLLMPIMNKYVSGLGEGKAMYLLFVKAETLTDSGIPVRSVLTSYYKSPHFLHRKHDLYNNYTSPDEVILCPDSQQSMYCQLLCGLIERHHVLRLGAVFASAFLRSISFLEQHWRDLVNDIRIGKLNSNVTNNACRLAMVGFLALPNPELADELEEICSCGPWKGILGRLWPNVKYIEAVLTGTMAQYIPMLEFYSGGRIPLVCTMYASSESYFGVNLRPLCNPTDVSYTILPNMAYFEFIPLEDGLRVTDDEDVVENDKLVSLVDVKVGCYYELVVTTFSGLYRYRVGDVLQVTGFYNCAPQFKFICRRNVILSIDSDKTNEEDLHNSVTRAKKILEDRNYILLEYTSYADTSTVPGHYVLFWEIKSTCEGGAPLDAQLLESCCTAVEESLDYIYRRCRAHDKSVGPLEIRLVEAGAFDALMDLLVSQGSSINQYKTPRCIESGLALKVLNSKVIASFFSPRDPQWTM

SEQ ID NO: 143 - protein, 572 aa, Brassica rapa
MINLTEEDAGLAMLEKLTSNVKQIQDAVLKEILTCDANTEYLRSFLHGSSDKELFKKNVPVGTYEDFKPYIERVVNGEPSEIISGKPITGFILTSGTSGGKQKLIPLNNKYLENARLLFDLRYLVLSKHVDGHNEGKGLHLIFLKPASKTPSGLPASYATTYFMKSDYYVKNLPSYWDTSSTSPTEIKFCPDNKQSLYCHLLCGLVLRDEVTRVSANFASILVQGITFLENFWKEMCSNIRSGQLSDWITDSCKGSVSMILGGPNPQLADIIEDICNQKSWKGIIPQLWPKTKYIECIVTGQMAQHVPLLEFYVNDLPLVSPNYASSEAMFGVNLNPLCKPQDVSYTFLPNMSYFEFIPVGEGKDTIFDLVNVKLGLYYELVVTNYAGLHRYRVGDVLQVTGFYNSAPQFKFIRRQNTVLSVYLEATTEEDLLKGVTRASQVLKSSDIMLRDFTCYPHVSDAPGHYVLYWELKGNNDDGISEIDTNMLVECCSVVEESLGALYKRYRSKERSIGALEIRVVQQGTFDALMEYFISQGASLAQYKTPRCIKSSEALQVLENRVLARFFSEKLP

SEQ ID NO: 144 - protein, 594 aa, Glycine max
MAIATCDHDKNAKALQFIEDMTQNTESVQERVLAEILSQNSQTEYLKRFELNGATDRDTFKSKVPVVSYDDLKHDIHRIANGDRSPILCAHPISEFLTSSGTSAGERKLMPTIRQEMDRRQLIFSLPMPVMNQYVTDMDKGKALIFLFTKAEQKTPSGLVARPVSASMYKSDQFKNRPYDPYNVYTSPDEAILCPDSFQSMYTQMLCGLIMRHQVLRVGANFASGLLRSIHLLQLNWAQLSHDISTGTLNPKITDPAIKQRMTQILKPDPELAEFIVKECSGENWERIIPRIWPNTKYVEVVVTGAMAQYVPTLDYYSGGLPLASNIYGSSECFFGINLNPFCNPSDVSYTIMPNMGYFEFLPQDHDDDASSSSGSSFTLSRLIDLDDVELGKSYEIVVTTYSGLCRYRVGDILRVTGFHNTAPQFSFVRRKNVLLSIDSDKTDEAELQNAVEKASVLLKEFKTSVVEYTSFADTKSIPGHYVIYWELLMKDSSNAPTTEALEQCCLTMEESLNAVYRQGRVADHSIGPLEIRVVKNGTFEELMDYAISRGASISQYKVPRCVTFTPITELLDSRVESVHFSPSEPHWTPERRR

SEQ ID NO: 145 - protein, 491 aa, Glycine max
MAIANCDDKNAKALQFIEDMTQNTDSVQKRVLAEILSQNAKTEYLKRFELNAATDRDTFKSKVPVVSYDDLKHDIQRIANGDRSPILCAHPISEFLTSSGTSAGERKLMPTIRQEMDRRQLLYSLLMPVMNQYVPDLDKGKALLFLFIKAETKTPSGLVARPVLTSLYKSDQFKNRPYDPFNVYTSPDEAILCPDSFQSMYTQMLCGLIMRHQVLRVGAVFASGLLRAIRFLQLNWAELAHDISTGTLNPKISDLAIKQRMTQILTPNPELADFIVKECSGENWDRIITRIWPNTKYLDVIVTGAMAQYIPTLDYYSGGLPKACTMYASSECYFGLNLNPICTPSDVSYTIMPNMGYFEFLPHEEDLSSSSSSSTLSRDSLDLADLELGKSYELIVTTYSGLCRYRVGDILQVTGFHNTAPHFSFVRRKNVLLSIDSDKTDEAELQNAVENASVLLREFKTSVAEYTSFADTKSIPGHYVIYWEHLSLFFL

1. A method to detoxify an auxin-analog herbicide comprising applying to a plant, a plant cell or a seed an auxin-analog herbicide, wherein said plant, plant cell or seed comprises a heterologous polynucleotide encoding a GH3 polypeptide having amino acid/auxin-analog conjugation activity, and wherein expression of the GH3 polypeptide produces an aspartate/auxin-analog conjugate or a glutamate/auxin-analog conjugate wherein said auxin-analog conjugate has reduced herbicidal activity,
and further wherein said GH3 polypeptide comprises
a) a polypeptide having an amino acid sequence having at least 85%, 90%, 95% or 100% sequence identity to any one of SEQ ID NO: 1, 2, 3, 4, 5, 6, 7, 8, 9, 10, 11, 12, 13, 14, 33, 34, 35, 36, 37, 38, 39, 40, 41, 42, 43, 44, 45, 46, 47, 48, 49, 50, 58, 68, 69, 70, 71, 72, 73, 74, 75, 76, 77, 78, 79, 80, 81, 82, 83, 84, 85, 86, 87, 88, 89, 90, 91, 92, 93, 94, 95, 96, 97, 117, 118, 119, 120, 121, 124, 142, 144, or 145; or
b) a polypeptide having an amino acid sequence having at least 80%, 85%, 90%, 95% or 100% sequence identity to any one of SEQ ID NO: 15, 16, 17, 51, 52, 53, 54, 55, 56, 57, 59, 60, 61, 62, 63, 64, 65, 66, 67, 98, 99, 100, 101, 102, 103, 104, 105, 106, 107, 108, 109, 110, 111, 112,113, 114, 115, 116, 122, 134, 135, 136, 137, 138, 139, 140, or 141; or
c) a polypeptide having an amino acid sequence having at least 80%, 85%, 90%, 95% or 100% sequence identity to any one of SEQ ID NO: 18, 19, 20, 21, 22, 23, 24, 25, 26, 27, 28, 29, 30, 31, 32, 123, 125, 126, 127, 128, 129, 130, 131, 132, 133, or 143.

2. A method for controlling at least one weed in an area of cultivation comprising a crop or a seed of the crop, said method comprising applying to the area of cultivation and/or applying to the crop or a seed of the crop in the area of cultivation a sufficient amount of an auxin-analog herbicide to control weeds without significantly affecting the crop, wherein said crop or seed thereof in said area of cultivation comprises at least one heterologous polynucleotide encoding a GH3 polypeptide having amino acid/auxin-analog conjugation activity,
and further wherein said GH3 polypeptide comprises
a) a polypeptide having an amino acid sequence having at least 85%, 90%, 95% or 100% sequence identity to any one of SEQ ID NO: 1, 2, 3, 4, 5, 6, 7, 8, 9, 10, 11, 12, 13, 14, 33, 34, 35, 36, 37, 38, 39, 40, 41, 42, 43, 44, 45, 46, 47, 48, 49, 50, 58, 68, 69, 70, 71, 72, 73, 74, 75, 76, 77, 78, 79, 80, 81, 82, 83, 84, 85, 86, 87, 88, 89, 90, 91, 92, 93, 94, 95, 96, 97, 117, 118, 119, 120, 121, 124, 142, 144, or 145; or
b) a polypeptide having an amino acid sequence having at least 80%, 85%, 90%, 95% or 100% sequence identity to any one of SEQ ID NO: 15, 16, 17, 51, 52, 53, 54, 55, 56, 57, 59, 60, 61, 62, 63, 64, 65, 66, 67, 98, 99, 100, 101, 102, 103, 104, 105, 106, 107, 108, 109, 110, 111, 112,113, 114, 115, 116, 122, 134, 135, 136, 137, 138, 139, 140, or 141; or
c) a polypeptide having an amino acid sequence having at least 80%, 85%, 90%, 95% or 100% sequence identity to any one of SEQ ID NO: 18, 19, 20, 21, 22, 23, 24, 25, 26, 27, 28, 29, 30, 31, 32, 123, 125, 126, 127, 128, 129, 130, 131, 132, 133, or 143.

3. A method for controlling at least one weed in an area of cultivation containing a crop comprising
(a) applying to the area of cultivation a sufficient amount of an auxin-analog herbicide to control weeds without significantly affecting the crop;
(b) planting the field with a crop or a seed thereof having a heterologous polynucleotide encoding a GH3 polypeptide having amino acid/auxin-analog conjugation activity,
and further wherein said GH3 polypeptide comprises
a) a polypeptide having an amino acid sequence having at least 85%, 90%, 95% or 100% sequence identity to any one of SEQ ID NO: 1, 2, 3, 4, 5, 6, 7, 8, 9, 10, 11, 12, 13, 14, 33, 34, 35, 36, 37, 38, 39, 40, 41, 42, 43, 44, 45, 46, 47, 48, 49, 50, 58, 68, 69, 70, 71, 72, 73, 74, 75, 76, 77, 78, 79, 80, 81, 82, 83, 84, 85, 86, 87, 88, 89, 90, 91, 92, 93, 94, 95, 96, 97, 117, 118, 119, 120, 121, 124, 142, 144, or 145; or
b) a polypeptide having an amino acid sequence having at least 80%, 85%, 90%, 95% or 100% sequence identity to any one of SEQ ID NO: 15, 16, 17, 51, 52, 53, 54, 55, 56, 57, 59, 60, 61, 62, 63, 64, 65, 66, 67, 98, 99, 100, 101, 102, 103, 104, 105, 106, 107, 108, 109, 110, 111, 112,113, 114, 115, 116, 122, 134, 135, 136, 137, 138, 139, 140, or 141; or
c) a polypeptide having an amino acid sequence having at least 80%, 85%, 90%, 95% or 100% sequence identity to any one of SEQ ID NO: 18, 19, 20, 21, 22, 23, 24, 25, 26, 27, 28, 29, 30, 31, 32, 123, 125, 126, 127, 128, 129, 130, 131, 132, 133, or 143.

4. The method of any one of claim 2 or 3, wherein said crop exhibits an increased insensitivity to the auxin-analog herbicide as compared to an appropriate control plant.

5. (canceled)

6. (canceled)

7. (canceled)

8. (canceled)

9. The method of any one of claims 1-3, wherein
said auxin-analog herbicide comprises 2,4-D or dicamba.

10. The method of claim 2 or 3, wherein said crop further comprises at least one polypeptide imparting tolerance to an additional herbicide.

11. The method of claim 10, wherein said at least one polypeptide imparting tolerance to an additional herbicide comprises:
(a) a sulfonylurea-tolerant acetolactate synthase;
(b) an imidazolinone-tolerant acetolactate synthase;
(c) a glyphosate-tolerant 5-enolpyruvylshikimate-3-phosphate synthase;
(d) a glyphosate-tolerant glyphosate oxido-reductase;
(e) a glyphosate-N-acetyltransferase;
(f) a phosphinothricin acetyl transferase;
(g) a protoporphyrinogen oxidase;
(h) an HPPD enzyme;
(i) a P450 polypeptide; or,
(j) an acetyl coenzyme A carboxylase (ACCase).

12. The method of claim 11, wherein said at least one polypeptide imparting tolerance to an additional herbicide comprises a high resistance allele of acetolactate synthase (HRA) and/or a glyphosate-N-acetyltransferase polypeptide.

13. The method of claim 2 or 3, wherein the crop further comprises at least one additional polypeptide imparting tolerance to an auxin-analog herbicide, wherein said additional polypeptide is either the same or different than said GH3 polypeptide encoded by the heterologous polynucleotide.

14. The method of claim 1, wherein said plant, plant cell or seed is from a monocot.

15. The method of claim 1, wherein said plant, plant cell or seed is from a dicot.

16. The method of claim 2 or 3, wherein said crop is from a monocot.

17. The method of claim 2 or 3, wherein said crop is from a dicot.

18. (canceled)

19. (canceled)

20. (canceled)

21. (canceled)

22. (canceled)

23. (canceled)

24. (canceled)

25. (canceled)
